(19) United States
(12) Patent Application Publication
(10) Pub. No.: US 2012/0141487 A1
(43) Pub. Date: Jun. 7, 2012

(54) MORAXELLA CATARRHALIS ANTIGENS

(75) Inventors: Alexander Von Gabain, Vienna (AT); Eszter Nagy, Vienna (AT); Andreas Meinke, Pressbaum (AT); Sanja Selak, Vienna (AT); Markus Hanner, Pressbaum (AT); Margarita Smidt, Vienna (AT); Julia Flor, St. Andra-Wordern (AT); Birgit Noiges, Crossrussbach (AT); Wolfgang Schueler, Vienna (AT); Ulrike Schirmer, Vienna (AT); Verena Salletmayer, Vienna (AT); Mario Aistleithner, Wiener Neustadt (AT); Stefan Seidel, Wiener Neustadt (AT); Martin Oleksiewicz, Vienna (AT)

(73) Assignee: Intercell AG, Vienna (AT)

(21) Appl. No.: 13/321,929

(22) PCT Filed: May 28, 2010
(86) PCT No.: PCT/EP10/57414

§ 371 Date: Feb. 21, 2012

(30) Foreign Application Priority Data
May 28, 2009 (EP) 09161338.0

(51) Int. Cl. A61K 39/395; C12N 15/63; C12N 1/21; C07K 14/21; C07K 7/06; C07K 7/08; C12N 15/09; A61K 39/02; C07K 16/12; C12N 5/16; G01N 33/569; A61P 37/04; C12N 1/15; C12N 1/19; C12N 5/10; C07H 21/04

(52) U.S. Cl. 424/139.1; 536/23.1; 536/24.5; 435/320.1; 435/252.3; 530/350; 530/329; 530/324; 530/326; 530/327; 530/328; 435/69.3; 424/190.1; 530/387.9; 435/331; 435/7.32; 435/252.33; 435/252.35; 435/252.31; 435/254.11; 435/254.2; 435/254.3; 435/348; 435/325; 435/358; 435/365; 435/367; 435/352; 435/419

(57) ABSTRACT

The present invention relates to isolated nucleic acid molecules which encode an antigen from a Moraxella catarrhalis (Meat) species, a vector which comprises such nucleic acid molecule, and a host cell comprising such vector. Furthermore, the invention provides antigens from a Moraxella catarrhalis species, as well as fragments and variants thereof, a process for producing such antigens, and a process for producing a cell which expresses such antigen. More specifically, such antigens are produced by or associated with bacterial infections caused by Moraxella catarrhalis. Moreover, the present invention provides antibodies binding to such antigen, a hybridoma cell producing such antibodies, methods for producing such antibodies, a pharmaceutical composition comprising such nucleic acid molecule, antigen, vector or antibody, the use of such nucleic acid molecule, antigen, vector or antibody for the preparation of a pharmaceutical composition, methods for identifying an antagonist capable of binding such antigen or of reducing or inhibiting the interaction activity of such antigen, methods for diagnosing an infection with Moraxella catarrhalis and methods for the treatment or prevention of an infection with Moraxella catarrhalis.

[0001] The present invention relates to isolated nucleic acid molecules which encode an antigen from a Moraxella catarrhalis (Mcat) species, a vector which comprises such nucleic acid molecule, and a host cell comprising such vector. Furthermore, the invention provides antigens from a Moraxella catarrhalis species, as well as fragments and variants thereof, a process for producing such antigens, and a process for producing a cell which expresses such antigen. More specifically, such antigens are produced by or associated with bacterial infections caused by Moraxella catarrhalis. Moreover, the present invention provides antibodies binding to such antigen, a hybridoma cell producing such antibodies, methods for producing such antibodies, a pharmaceutical composition comprising such nucleic acid molecule, antigen, vector or antibody, the use of such nucleic acid molecule, antigen, vector or antibody for the preparation of a pharmaceutical composition, methods for identifying an antagonist capable of binding such antigen or of reducing or inhibiting the interaction activity of such antigen, methods for diagnosing an infection with Moraxella catarrhalis and methods for the treatment or prevention of an infection with Moraxella catarrhalis.

[0002] Moraxella catarrhalis (Mcat) is a Gram-negative bacterium. Microscopically, the organism appears as a diplococcus, and grows aerobically. Previously used names for Mcat include Branhamella catarrhalis, Neisseria catarrhalis, Micrococcus catarrhalis and Mikrokokkus catarrhalis (Mawas et al., 2009; Karalus et al., 2000; Catlin 1990). Mcat has a genome of approximately 1.9 Mbp, comprising approximately 1,800 open reading frames (Ruckdeschel et al., 2008). Different types of Mcat can differentiated by molecular methods such as multilocus sequencing, sequencing ribosomal RNA, pulsed field gel electrophoresis, and mass spectrometric analysis of membrane proteins (Schaller et al., 2006; Pingault et al., 2007; Pingault et al., 2008; Verduin et al., 2002). The lipooligosaccharide of Mcat is thought too conserved for practical serotyping, but nevertheless three different lipooligosaccharide serotypes have been described (Verduin et al., 2002).

[0003] Mcat is identified based on a combination of microbiological culture criteria, such as oxidase production, absence of acid production from carbohydrates such as glucose, maltose, sucrose, lactose and fructose, DNase production, nitrate/nitrite reduction, and conversion of specific chromogenic enzyme substrates (Doern et al., 1980; Janda et al., 1987; Catlin 1990; Verduin et al., 2002). Also, Mcat can be diagnosed using PCR (Verduin et al., 2002).

### Pathogenesis of Mcat Infection

[0004] Mcat is an obligate commensal of humans and possibly nonhuman primates (McMichael 2001; VandeWoude et al., 1991). Mcat is the third-most frequently isolated bacterium from human respiratory secretions, with Streptococcus pneumoniae and nontypeable Haemophilus influenzae being first and second, respectively (Karalus et al., 2000; Mawas et al., 2009; McMichael 2001; Verduin et al., 2002).

[0005] Mcat was originally thought to be an innocuous commensal of the human respiratory epithelium. However, over the last approximately 20 years it has been realized that Mcat is an important respiratory pathogen. Most children experience Mcat colonization by the age of 1 year (Murphy 2005; Tan et al., 2007a). In children, Mcat in the third-most frequent causative agent of otitis media after Streptococcus pneumoniae and nontypeable Haemophilus influenzae, being responsible for 15-20% of otitis media cases (Murphy 2005; Verduin et al., 2002; Tan et al., 2007a). Mcat also is a frequent cause of sinusitis in children (Murphy 2005; Verduin et al., 2002). More rarely, Mcat can cause bacteriaemia and meningitis in children (Karalus et al., 2000). In adults with chronic obstructive pulmonary disease (COPD), Mcat causes lower respiratory tract infections and exacerbation of the COPD (Verduin et al., 2002). Finally, Mcat can cause severe, systemic infections in immunocompromised patients, and is also a nosocomial pathogen (Verduin et al., 2002).

[0006] Before 1970, Mcat isolates were generally sensitive to beta lactam antibiotics, but resistance has developed quickly after the first detection of beta lactamase-producing Mcat in 1976-1977 (Verduin et al., 2002; Karalus et al., 2000). Currently, up to 90% of Meat isolates are beta lactamase positive and thus resistant to beta lactam antibiotics such as penicillin or amoxicillin (Budhani et al., 1998; Verduin et al., 2002; Tan et al., 2007a). Mcat has 2 species of beta lactamase enzymes termed BRO-1 and BRO-2. The Mcat beta lactamases are different from those found in other pathogenic bacteria, and have been suggested to have origin in lipoproteins of Gram-positive bacteria (Karalus et al., 2000; Verduin et al., 2002).

[0007] Beta lactamase secreted from Mcat can protect co-infecting bacteria such as Streptococcus pneumoniae or nontypeable Haemophilus influenzae against beta lactam antibiotics (Verduin et al., 2002; Mawas et al., 2009; Budhani et al., 1998). Also, Mcat can protect co-infecting bacteria such as nontypeable Haemophilus influenzae from complement-mediated lysis (Tan et al., 2007b).

[0008] Finally, in a mouse model of otitis media, coinfection with Mcat facilitated Streptococcus pneumoniae infection (Krishnamurthy et al., 2009). Thus, Mcat is thought to have a double importance for otitis media development: Not only does Mcat act as a primary pathogen, but Mcat potentially also facilitates clinical establishment of other pathogens such as Streptococcus pneumoniae or nontypeable Haemophilus influenzae.

[0009] Key to Mcat pathogenesis is the ability to bind to and replicate on the human respiratory tract epithelial layer. Interactions with epithelial cells occur through bacterial membrane adhesin proteins such as ubiquitous surface proteins A1 and A2 (UspA1 and UspA2), MID/Hag OMP CD and McaP (Tan et al., 2007a). Bacterial lipooligosaccharides also contribute to adhesion (Tan et al., 2007a). In some Mcat isolates, pili may contribute to adhesion (Verduin et al., 2002). Finally, Mcat expresses surface lactoferrin and transferrin receptors, to ensure an adequate iron supply, and allow replication in its human host (Verduin et al., 2002).

[0010] In vitro studies have shown that in addition to adhering to epithelial surfaces, Mcat can also invade bronchial and lung epithelial cells, as well as phagocyte-like type II lung alveolar cells (Slevogt et al., 2007). Studies on clinical biopsy specimens have confirmed that in vivo, Mcat is able to penetrate epithelial layers, and to persist at sub-epithelial and intracellular locations (Heiniger et al., 2007).

[0011] Following colonization, resistance to lysis by human complement is thought to help Mcat maintain its presence on epithelia despite the host immune response (Verduin et al., 2002). While horizontal transfer of the beta lactamase BRO1 and BRO2 genes occurs frequently between Mcat strains, complement resistance appears to be a multigene phenomenon, that is stably inherited and not easily exchanged between Mcat strains (Verduin et al., 2000; Bootsma et al., 2000).

[0012] Serum bactericidal antibodies are more frequently found in convalescent sera than in acute phase sera of adult patients with lower respiratory tract Mcat infection (Verduin et al., 2002). Likewise, Mcat-induced otitis media in children is associated with increases in serum anti-Mcat antibodies measured by ELISA (Verduin et al., 2002). In children, antibodies of the IgG3 subclass have been suggested to be involved in protection (Verduin et al., 2002). Finally, it is known that otitis media fluid contains locally produced IgG and IgA antibodies, i.e., mucosal immunity is thought to play a role in otitis media (Verduin et al., 2002). Nevertheless, the protective immune mechanisms in Mcat infections are as yet poorly explored, and while the presence of bactericidal antibodies are sometimes used for this purpose, there are as yet no firmly established in vitro correlates of protection (Murphy 2005).

### Otitis Media

[0013] Otitis media (OM) is a disease of children. OM is very prevalent, affecting 75% of children before the age of 3 years (Cripps and Otczyk 2006). Clinically, acute OM is defined by an abrupt onset of middle ear effusion and inflammation, diagnosed by various methods to visualize bulging of the tympanic membrane, and presence of effusion in the middle ear cavity (Marcy 2004). Typically, acute OM is preceded by an upper respiratory tract infection 3-5 days prior, and acute OM is often associated with ear pain (Marcy 2004). In some children, OM becomes recurrent and persistent, causing problems with hearing, and speech and language development (Cripps and Otczyk 2006). Treatment of OM is initially symptomatic, with more severe cases requiring antibiotic treatment or tympanostomy tube placement and adenoidectomy (Marcy 2004; Cripps and Otczyk 2006). Due to the high prevalence, OM constitutes a major burden to children and the health system. OM is the main presentation in young children visiting medical practitioners, and OM is the reason for over half of the antibiotics prescribed to children below 3 years in the US (Cripps and Otczyk 2006). Finally, the prevalence of OM has been reported to have increased over the last decades in several industrialized countries such as Finland, USA and Australia (Cripps and Otczyk 2006).

[0014] While environmental or host factors compromising the integrity of the nasopharyngeal epithelium predispose to OM, the ultimate cause of OM is infectious, comprising bacteria (nontypeable Haemophilus influenzae, Streptococcus pneumoniae, Moraxella catarrhalis) as well as viruses (respiratory syncytial virus, rhinovirus, influenza virus, parainfluenza virus, metapneumovirus and coronavirus). Bacteria are isolated from the majority (˜80%) of OM cases. Mcat infection is currently thought to be responsible for up to 20% of acute otitis media cases (Karalus et al., 2000; Verduin et al., 2002; Tan et al., 2007a; Murphy 2005).

[0015] Vaccination is known to be protective against OM. For example, influenza virus vaccination can reduce acute OM incidence in children during the influenza season (Marcy 2004). Vaccination with a Streptococcus pneumoniae conjugate vaccine, containing polysaccharide antigens of 7 serotypes conjugated to a nontoxic diphtheria toxin variant, has been shown to reduce acute OM incidence (Marcy 2004; Cripps and Otczyk 2006). An 11-valent conjugate vaccine, containing polysaccharide antigens of 11 serotypes of Streptococcus pneumoniae conjugated to the protein D of nontypeable Haemophilus influenzae showed protection against acute otitis media caused by Streptococcus pneumoniae and nontypeable Haemophilus influenzae (Prymula et al., 2006). However, use of the 7-valent pneumococcal vaccine has been shown to cause “pathogen replacement”, i.e., increased incidence of acute OM cases caused by pneumococcal serotypes not covered by the vaccine, or caused by other pathogens such as nontypeable Haemophilus influenzae, Moraxella catarrhalis, Streptococcus pyogenes and Staphylococcus aureus (Cripps and Otczyk 2006; Tan et al., 2007a). The phenomenon of “pathogen replacement” is a potential concern also for the 11-valent pneumococcal vaccine (Tan et al., 2007a). Pathogen replacement is also thought to provide selective pressure for the spread of penicillin resistance to nonvaccine pneumococcal serotypes (Cripps and Otczyk 2006).

### Vaccination Against Otitis Media

[0016] Otitis media can be caused by Streptococcus pneumoniae, nontypeable Haemophilus influenzae and Moraxella catarrhalis. While Moraxella catarrhalis causes approximately 20% of otitis media cases, Mcat also has an indirect effect due to secretion of beta lactamase, and protection of nontypeable Haemophilus influenzae against complement lysis (Tan et al., 2007b). Finally, Mcat may increase in importance as an otitis media pathogen due to “pathogen replacement” phenomena associated with vaccines against other otitis media pathogens (Tan et al., 2007a).

[0017] Thus, a vaccine against Mcat would be valuable for prevention of otitis media, as well as the other clinical manifestations of Mcat infection such as lower respiratory infections in adults with COPD.

[0018] Based on the experience that pneumococcal polysaccharide conjugate vaccine promotes pathogen replacement (Cripps and Otczyk 2006; Tan et al., 2007a), it can be hypothesized that an ideal Mcat vaccine would comprise Mcat proteins (as opposed to carbohydrates), that are highly conserved across clinical strains.

[0019] A number of candidate Mcat vaccine antigens have been identified, comprising mainly proteins involved in adhesion (UspA1, Hag, OMP CD, McaP), proteins involved in serum resistance (UspA2), proteins involved in iron acquisition (TbpA, TbpB, CopB, LbpA, LbpB), and lipooligosaccharide (Murphy 2005; Mawas et al., 2009; Tan et al., 2007a).

[0020] Nevertheless, at most, 15 candidate antigens have been described, and they comprise essentially some of the most abundant Mcat surface proteins (Murphy 2005; Mawas et al., 2009; Tan et al., 2007a).

[0021] Thus, it appears very likely that additional vaccine candidate antigens based on Mcat proteins can be found by appropriately designed screening methods.

[0022] Based on current knowledge of Mcat pathogenesis outlined above, Mcat protein vaccine antigens should be sought amongst Mcat membrane proteins that are (i) expressed and surface exposed during colonization of human epithelia, (ii) induce antibody responses in humans, (iii) with antibodies preventing adhesion to human nasopharyngeal cells, and/or exhibiting bactericidal activity in vitro.

[0023] Preclinical in vivo confirmation of vaccine antigens could be done in animal models of otitis media, of which several are available, e.g. chinchilla, rats and mice (Murphy 2005; Mawas et al., 2009; Tan et al., 2007a).

[0024] A vaccine can contain a whole variety of different antigens. Examples of antigens are whole-killed or attenuated organisms, subfractions of these organisms/tissues, proteins, or, in their most simple form, peptides. Antigens can also be recognized by the immune system in form of glycosylated proteins or peptides and may also be or contain polysaccharides or lipids. Short peptides can be used since for example cytotoxic T-cells (CTL) recognize antigens in the form of short, usually 8-11 amino acids long, peptides in conjunction with major histocompatibility complex (MHC). B-cells can recognize linear epitopes as short as 4-5 amino acids, as well as three-dimensional structures (conformational epitopes).

[0025] In order to stimulate sustained antigen-specific immune responses, adjuvants need to trigger immune cascades that involve all cells of the immune system. Primarily, adjuvants act, but are not restricted in their mode of action, on so-called antigen presenting cells (APCs). These cells usually first encounter the antigen(s) followed by presentation of processed or unmodified antigen to immune effector cells. Intermediate cell types may also be involved. Only effector cells with the appropriate specificity are activated in a productive immune response. The adjuvant may also locally retain antigens and other factors that may be co-injected. In addition, the adjuvant may act as a chemoattractant for other immune cells or may act locally and/or systemically as a stimulating agent for the immune system.

[0026] Antibodies naturally produced against Mcat by the human immune system and present in human sera are indicative of the in vivo expression of the antigenic proteins and their immunogenicity. The recognition of linear epitopes recognized by serum antibodies can be based on sequences as short as 4-5 amino acids. Of course it does not necessarily mean that these short peptides are capable of inducing the given antibody in vivo. For that reason the defined epitopes, polypeptides and proteins are further to be tested in animals (mainly in mice) for their capacity to induce T cells and antibodies against the selected proteins in vivo.

[0027] In addition to the T cell-mediated immune response, antibodies against cell wall proteins induced by B cell epitopes may aid the T cell-mediated immune response and serve multiple purposes: they may inhibit adhesion, interfere with nutrient acquisition, inhibit immune evasion and promote phagocytosis (Hornef, M. et al., 2002). Antibodies against secreted proteins are potentially beneficial in neutralization of their function as toxins or virulence components. It is also known that bacteria communicate with each other through secreted proteins. Neutralizing antibodies against these secreted proteins can interrupt growth-promoting cross-talk between or within the bacteria. The described experimental approach is based on the use of Mcat-induced antibodies which are purified from human sera. The antigens identified by the genomic screens, therefore, are shown to be both expressed in vivo in the host and to be capable of inducing an antibody response. Since it has been shown for many proteins that B cell and T cell epitopes reside in the same protein, the most promising candidates identified by the genomic screens can be further evaluated for the induction of a potent T cell response in vivo. As a first step, bioinformatic analyses have been used to identify potential T cell epitopes in silico, which can then be tested in an appropriate murine model of infection. Thus the present invention combines the experimental identification of immunogenic proteins with the bioinformatic prediction of T cell epitopes in order to provide candidates for an efficient vaccine to treat or prevent Mcat infections.

[0028] The problem underlying the present invention was to provide means for the development of pharmaceutical compositions such as vaccines against infections caused by Mcat. More particularly, the problem was to provide an efficient, relevant and comprehensive set of nucleic acid molecules or antigens, or fragments or variants thereof, from Mcat that can be used for the preparation of said pharmaceutical compositions. A still further problem was to provide methods and means for producing an antigen, a fragment or variant thereof. Yet another problem was to provide pharmaceutical compositions comprising said nucleic acids or said antigens. A still further problem of the invention was to provide antibodies, pharmaceutical compositions comprising said antibodies, methods for the production of said antibodies and the use of said antibodies for the preparation of a pharmaceutical preparation. Furthermore, the object of the present invention was to provide methods for identifying an antagonist capable of binding an antigen, or a fragment or variant thereof, as well as to provide methods for identifying an antagonist capable of reducing or inhibiting the interaction activity of such an antigen to its interaction partner. A further problem of the present invention was to provide methods for diagnosing an infection with an Mcat organism. Still another problem underlying the invention was to provide methods for treating Mcat infections, and to provide methods for immunizing an animal or human.

[0029] The problem underlying the present invention is solved in one aspect by an isolated nucleic acid molecule encoding an antigen or a fragment thereof, comprising a nucleic acid sequence, which is selected from the group consisting of:
[0030] a) a nucleic acid molecule having at least 70% sequence identity to a nucleic acid molecule having a nucleotide sequence selected from the group consisting of SEQ ID NOs 860 to 886 and 1 to 214,
[0031] b) a nucleic acid molecule which is complementary to the nucleic acid molecule of a),
[0032] c) a nucleic acid molecule comprising at least 15 sequential bases of the nucleic acid molecule of a) or b),
[0033] d) a nucleic acid molecule which anneals under stringent hybridisation conditions to the nucleic acid molecule of a), b), or c), and
[0034] e) a nucleic acid molecule which, but for the degeneracy of the genetic code, would hybridise to the nucleic acid molecule defined in a), b), c), or d).

[0035] In an embodiment of the invention the sequence identity to SEQ ID NOs 860 to 886 or 1 to 214 is at least 80%, more preferably at least 90%, still more preferably at least 95%, 96%, 97%, 98%, or 99%, or most preferably 100%.

[0036] In an embodiment the nucleic acid is DNA.

[0037] In an alternative embodiment the nucleic acid is RNA.

[0038] In still another embodiment the nucleic acid molecule is isolated from a genomic DNA, preferably from an Mcat species.

[0039] In an embodiment of the invention the encoded antigen fragment is an active fragment or an active variant thereof.

[0040] In an embodiment the nucleic acid encodes an antigen or fragment thereof, which comprises or consists of a polypeptide or peptide fragment from Mcat.

[0041] The problem underlying the present invention is further solved by a vector comprising a nucleic acid molecule as described above.

[0042] In an embodiment the vector is adapted for recombinant expression of the antigen, or fragment thereof, encoded by the nucleic acid molecule as defined above.

[0043] The present invention also relates to a host cell comprising the vector as defined above.

[0044] The problem underlying the present invention is solved in a further aspect by an antigen that is immunologically reactive with sera from a human having an Mcat infection, or an uninfected healthy human who was previously infected with Mcat, wherein the antigen comprises an isolated polypeptide or an active fragment or an active variant thereof from Mcat.

[0045] The term “uninfected healthy human” as used herein comprises those individuals who have or had multiple encounters with the pathogen, which may result in colonization, but which either do not result in any symptoms, or which result in mild diseases. Said term and the rationale of selecting sera of uninfected healthy humans for antigen identification is further defined in Nagy, E. et al., (2003).

[0046] Another aspect of the present invention relates to an antigen, comprising or consisting of an isolated polypeptide selected from the group consisting of SEQ ID NOs 887 to 913 and 215 to 428, or an active fragment or an active variant thereof.

[0047] In an embodiment of the invention said polypeptide is encoded by a nucleic acid molecule as defined above.

[0048] In another embodiment the active fragment of the antigen consists of at least 50%, especially at least 60%, preferably at least 70%, more preferably at least 80%, still more preferably at least 90%, even more preferably at least 95%, 96%, 97% or 98%, most preferably 99% of said polypeptide, especially of a polypeptide as defined by any of the SEQ ID NOs 887 to 913 or 215 to 428.

[0049] In an embodiment the active variant of the antigen has at least 50%, especially at least 60%, preferably at least 70%, more preferably at least 80%, still more preferably at least 90%, even more preferably at least 95%, 96%, 97% or 98%, most preferably 99% sequence identity to said polypeptide, especially to a polypeptide as defined by any of the SEQ ID NOs 887 to 913 or 215 to 428.

[0050] The additional amino acid residue(s) may be homologous to the antigen as defined above. Homologous refers to any amino acid residue(s) which is/are identical or similar to the amino acid sequence of the Mcat antigen from which the fragment is derived.

[0051] Alternatively or additionally, the polypeptide may comprise or consist of the antigen, optionally the additional sequence as defined above and at least one amino acid residue heterologous to the antigen.

[0052] In an embodiment of the invention, the antigen further comprises or consists of at least one amino acid residue heterologous to the antigen, preferably an amino acid sequence of a marker protein.

[0053] The additional sequence or amino acid residue(s) as defined above consist(s) of (an) amino acid residue(s), which may be any amino acid, which may be either an L- and/or a D-amino acid, naturally occurring and otherwise. Preferably the amino acid is any naturally occurring amino acid such as alanine, cysteine, aspartic acid, glutamic acid, phenylalanine, glycine, histidine, isoleucine, lysine, leucine, methionine, asparagine, proline, glutamine, arginine, serine, threonine, valine, tryptophan or tyrosine.

[0054] However, the amino acid may also be a modified or unusual amino acid. Examples of those are 2-aminoadipic acid, 3-aminoadipic acid, beta-alanine, 2-aminobutyric acid, 4-aminobutyric acid, 6-aminocaproic acid, 2-aminoheptanoic acid, 2-aminoisobutyric acid, 3-aminoisobutyric acid, 2-aminopimelic acid, 2,4-diaminobutyric acid, desmosine, 2,2′-diaminopimelic acid, 2,3-diaminopropionic acid, N-ethylglycine, N-ethylasparagine, hydroxylysine, allo-hydroxylysine, 3-hydroxyproline, 4-hydroxyproline, isodesmosine, allo-isoleucine, N-methylglycine, N-methylisoleucine, 6-N-methyllysine, N-methylvaline, norvaline, norleucine or ornithine. Additionally, the amino acid may be subject to modifications such as posttranslational modifications. Examples of modifications include acetylation, amidation, blocking, formylation, gamma-carboxyglutamic acid hydroxylation, glycosylation, methylation, phosphorylation and sulfatation. If more than one additional or heterologous amino acid residue is present in the peptide, the amino acid residues may be the same or different from one another.

[0055] The feature “heterologous amino acid” or “amino acid heterologous to the antigen” refers to any amino acid which is different from that amino acid located adjacent to the antigen in any naturally occurring protein of Mcat. Therefore, the protein of the invention encompassing at least one heterologous amino acid refers to a protein which is different from any naturally occurring protein of Mcat or fragments thereof.

[0056] In one embodiment, the additional amino acid residue(s) is/are flanking the antigen N-terminally, C-terminally or N- and C-terminally.

[0057] In another embodiment, the antigen further comprises or consists of either a leader or a secretory sequence, a sequence employed for purification, or a proprotein sequence.

[0058] The problem underlying the present invention is solved in another aspect by an antigen, whereby the antigen comprises a core amino acid sequence as indicated in Table 4, whereby more preferably the core amino acid sequence is selected from the group consisting of:

[0059] amino acids 4-10, 12-40, 46-52, 61-76, 78-94, 96-103, 107-114, 126-133, 135-150, 153-162, 167-174, 182-195, 199-208, 210-218, 226-244, 247-255, 262-276, 285-292, 9-99, 108-128, 132-169, 179-286, and 17-72 of SEQ ID NO 215; amino acids 7-17, 25-32, 36-53, 66-76, 83-91, 100-113, 124-131, 151-158, 168-179, 184-198, 213-225, 227-237, 247-256, 261-270, 275-281, 284-293, 295-305, 315-329, 345-358, 388-415, 436-443, 449-456, 471-483, 1-168, 180-204, 212-253, 261-313, 326-467, 472-486, 10-60, 92-130, and 207-280 of SEQ ID NO 216; amino acids 45-53, 58-65, 70-78, 81-87, 94-100, 163-179, 184-192, 201-207, 212-222, 224-230, 254-260, 263-268, 18-158, 163-232, and 211-260 of SEQ ID NO 217; amino acids 4-12, 25-33, 40-50, 62-69, 74-85, 97-109, 127-138, 141-149, 153-161, 197-203, 206-215, 217-223, 258-265, 272-286, 308-316, 325-335, 343-358, 366-371, 373-381, 400-406, 417-426, 444-458, 466-486, 498-514, 522-539, 544-555, 561-572, 603-619, 621-638, 658-672, 687-695, 710-723, 731-744, 747-752, 764-769, 789-805, 808-823, 830-840, 873-885, 888-900, 902-920, 930-943, 964-970, 992-1003, 1005-1016, 1033-1038, 1045-1057, 1059-1068, 1089-1096, 1104-1110, 1115-1142, 1150-1156, 1158-1169, 1188-1198, 1200-1205, 1-80, 88-153, 167-222, 231-249, 256-289, 304-337, 340-488, 491-679, 681-780, 803-878, 880-942, 951-986, 988-1014, 1030-1106, 1109-1133, 1136-1179, 1183-1203, 128-158, 161-232, 277-314, 590-627, 712-848, 957-963, 1007-1033, and 1074-1093 of SEQ ID NO 218; amino acids 4-29, 45-56, 68-78, 84-97, 100-109, 127-141, 145-151, 173-179, 189-197, 202-209, 214-220, 238-263, 266-279, 288-297, 307-315, 330-336, 343-351, 358-367, 373-382, 388-403, 412-421, 423-429, 435-441, 449-459, 462-468, 488-501, 503-522, 536-542, 559-572, 603-611, 623-630, 675-681, 684-690, 705-719, 1-33, 45-204, 210-414, 431-480, 486-532, 536-582, 597-691, 704-724, 496-512, and 542-618 of SEQ ID NO 219; amino acids 14-24, 50-70, 76-92, 100-128, 130-143, 150-155, 178-187, 215-221, 233-251, 261-267, 275-288, 295-301, 319-324, 339-364, 368-384, 404-453, 461-472, 493-510, 522-532, 534-550, 570-577, 598-633, 641-655, 666-672, 676-682, 762-772, 793-808, 819-826, 836-858, 860-867, 872-896, 900-907, 909-918, 929-948, 961-974, 990-1003, 1005-1015, 1018-1025, 1066-1076, 1081-1090, 1100-1113, 1124-1131, 1146-1152, 1191-1197, 1202-1208, 1214-1231, 1237-1254, 1282-1310, 1313-1325, 1333-1353, 1365-1378, 6-26, 35-55, 58-163, 166-184, 190-252, 258-300, 305-493, 495-559, 567-587, 591-654, 672-750, 753-813, 827-866, 870-889, 898-983, 993-1011, 1038-1107, 1139-1162, 1168-1191, 1199-1256, 1261-1355, 1365-1387, 199-293, 420-438, 643-694, 719-771, 823-881, 1050-1144, and 1267-1339 of SEQ ID NO 220; amino acids 14-42, 50-65, 69-81, 96-109, 122-129, 146-161, 170-184, 194-200, 206-215, 221-234, 241-248, 264-270, 273-281, 288-299, 303-316, 320-338, 345-352, 365-372, 426-443, 475-484, 499-515, 518-524, 537-546, 555-563, 565-572, 582-588, 601-608, 612-629, 642-647, 662-683, 698-703, 706-711, 718-731, 739-746, 758-766, 776-782, 801-807, 825-835, 840-852, 878-886, 889-897, 908-915, 920-933, 935-946, 972-979, 982-992, 1003-1008, 1013-1023, 1030-1042, 1065-1081, 1095-1103, 1116-1126, 1132-1138, 1155-1173, 1176-1184, 1186-1199, 1203-1209, 1216-1224, 1242-1262, 1270-1282, 1295-1306, 1308-1316, 1342-1348, 1352-1357, 1-74, 84-228, 233-258, 264-383, 391-449, 451-490, 496-547, 559-610, 616-635, 640-731, 752-778, 799-862, 874-990, 1064-1110, 1114-1138, 1144-1167, 1183-1203, 1209-1230, 1241-1281, 1289-1363, 443-561, 644-713, 767-806, and 990-996 of SEQ ID NO 221; amino acids 4-19, 25-33, 36-51, 53-67, 105-110, 1-72, 74-108, and 55-108 of SEQ ID NO 222; amino acids 15-36, 42-96, 101-112, 3-115, and 4-23 of SEQ ID NO 223; amino acids 4-10, 12-22, 25-32, 35-48, 54-59, 65-70, 100-111, 115-126, 132-149, 156-164, 166-188, 197-207, 220-235, 243-265, 272-278, 309-318, 322-329, 340-353, 355-370, 378-388, 393-398, 410-417, 441-447, 449-455, 1-227, 248-378, 395-427, 445-459, and 310-399 of SEQ ID NO 224; amino acids 5-39, 1-40, and 3-52 of SEQ ID NO 225; amino acids 10-16, 20-40, 58-80, 83-89, 98-119, 126-132, 138-149, 173-179, 193-210, 229-235, 242-248, 266-272, 293-301, 303-315, 335-350, 355-362, 368-377, 379-390, 402-408, 420-431, 438-443, 451-464, 471-476, 486-501, 504-525, 547-568, 606-612, 637-644, 649-656, 685-701, 728-740, 774-780, 784-791, 793-800, 806-816, 818-834, 853-860, 878-888, 890-895, 926-937, 969-976, 983-997, 1-48, 54-82, 101-122, 126-184, 186-235, 237-325, 350-443, 448-512, 523-545, 553-583, 595-623, 634-657, 660-729, 732-786, 804-841, 845-975, 980-1000, 23-130, 227-257, 269-346, 680-775, 817-894, and 922-983 of SEQ ID NO 226; amino acids 4-31, 34-55, 98-105, 127-137, 157-175, 187-194, 228-238, 255-262, 268-273, 281-296, 302-307, 314-327, 329-339, 346-352, 394-401, 407-416, 452-458, 466-477, 534-550, 561-571, 573-580, 597-605, 610-622, 624-630, 639-644, 650-656, 666-672, 689-696, 706-712, 728-735, 743-748, 785-790, 803-812, 820-825, 827-833, 843-848, 861-868, 4-51, 95-116, 125-207, 217-244, 254-363, 375-426, 440-469, 474-506, 527-574, 576-641, 653-682, 750-800, 803-835, 29-69, 204-337, 400-502, and 578-765 of SEQ ID NO 227; amino acids 8-16, 19-52, 61-68, 77-86, 88-98, 106-116, 126-131, 143-153, 163-178, 183-191, 211-217, 6-56, 85-99, 106-127, 140-222, and 101-185 of SEQ ID NO 228; amino acids 15-26, 46-53, 59-68, 75-86, 93-104, 116-122, 126-140, 154-165, 175-181, 206-216, 230-243, 251-257, 294-301, 305-311, 324-336, 364-372, 374-381, 394-400, 419-427, 435-447, 451-459, 1-108, 114-192, 208-285, 310-348, 375-483, 32-98, 122-144, 157-323, 336-351, 369-389, and 433-440 of SEQ ID NO 229; amino acids 4-10, 12-23, 27-40, 42-49, 59-67, 94-99, 1-41, 47-100, and 7-58 of SEQ ID NO 230; amino acids 4-22, 38-52, 110-117, 122-132, 144-154, 167-175, 1-29, 33-61, 71-128, 138-189, 24-38, 46-67, and 128-177 of SEQ ID NO 231; amino acids 4-9, 13-29, 39-45, 50-64, 67-77, 85-94, 103-120, 127-146, 148-156, 163-178, 180-192, 204-211, 213-238, 241-256, 266-295, 1-21, 42-140, 145-261, 263-315, and 135-227 of SEQ ID NO 232; amino acids 4-15, 33-58, 67-120, 129-139, 144-171, 1-178, and 7-61 of SEQ ID NO 233; amino acids 18-24, 26-34, 40-47, 53-70, 74-88, 103-125, 128-137, 150-159, 164-174, 181-188, 201-209, 220-230, 232-238, 249-272, 278-287, 290-303, 318-332, 346-353, 379-387, 394-419, 421-430, 433-441, 443-450, 470-488, 498-507, 509-524, 532-539, 543-550, 557-579, 602-608, 611-617, 624-632, 641-657, 671-676, 694-701, 720-730, 753-762, 764-785, 792-797, 801-807, 817-840, 853-859, 868-874, 878-894, 899-913, 915-921, 929-935, 1-43, 49-70, 100-164, 173-192, 198-258, 265-306, 315-371, 373-433, 438-461, 465-523, 525-741, 761-785, 787-808, 810-925, 937-953, 288-408, 577-608, 622-764, 826-899, and 923-948 of SEQ ID NO 234; amino acids 10-23, 36-44, 46-63, 70-79, 89-106, 118-128, 140-149, 161-170, 197-207, 233-245, 1-185, 190-234, 240-254, and 182-251 of SEQ ID NO 235; amino acids 6-20, 26-32, 41-47, 50-72, 75-83, 102-112, 114-140, 156-172, 178-187, 197-218, 228-269, 275-297, 307-336, 352-368, 370-377, 387-397, 1-399, and 303-363 of SEQ ID NO 236; amino acids 8-38, 40-46, 53-70, 88-94, 127-136, 140-145, 154-174, 186-191, 198-226, 236-243, 249-256, 260-266, 269-280, 320-333, 342-349, 357-363, 365-381, 385-430, 433-449, 456-465, 467-475, 488-493, 498-503, 510-520, 557-609, 618-624, 631-644, 646-673, 679-685, 690-696, 698-734, 780-797, 802-808, 810-829, 831-870, 879-890, 910-916, 926-942, 944-980, 1-76, 82-103, 105-156, 158-289, 295-474, 506-557, 565-803, 806-857, 867-898, 914-988, and 888-947 of SEQ ID NO 237; amino acids 16-23, 25-33, 41-53, 56-63, 70-79, 87-98, 100-111, 120-128, 131-149, 160-171, 214-230, 232-242, 247-255, 259-266, 273-282, 284-292, 308-347, 355-364, 370-376, 379-386, 554-563, 10-182, 212-232, 236-358, 364-409, 461-475, 478-498, 542-577, 140-160, 232-300, 321-394, and 514-522 of SEQ ID NO 238; amino acids 9-35, 39-51, 54-67, 71-78, 93-102, 105-116, 122-129, 138-147, 155-162, 168-192, 194-231, 253-261, 264-276, 281-293, 8-241, 244-265, 269-302, and 152-279 of SEQ ID NO 239; amino acids 35-56, 61-70, 74-101, 120-129, 152-165, 171-183, 192-224, 241-271, 278-285, 291-301, 303-319, 334-340, 367-391, 401-426, 437-442, 446-469, 475-488, 495-520, 523-529, 532-541, 543-550, 554-564, 570-598, 624-630, 633-638, 643-655, 663-685, 687-694, 698-725, 735-751, 758-765, 778-795, 1-22, 36-70, 72-128, 141-223, 231-267, 270-334, 339-605, 613-652, 655-778, 115-232, 312-332, 539-555, and 558-620 of SEQ ID NO 240; amino acids 15-39, 54-61, 65-71, 84-89, 98-111, 126-144, 154-160, 189-196, 199-206, 218-224, 259-275, 1-170, 175-230, 244-278, and 162-217 of SEQ ID NO 241; amino acids 22-37, 45-57, 59-65, 82-93, 102-112, 160-172, 200-207, 229-236, 244-268, 275-322, 327-344, 346-369, 376-414, 428-451, 459-490, 495-527, 531-555, 561-582, 600-612, 616-622, 625-635, 638-669, 683-709, 726-732, 735-763, 11-57, 72-88, 99-122, 139-221, 236-274, 279-328, 332-766, 60-145, and 187-223 of SEQ ID NO 242; amino acids 4-12, 32-78, 81-89, 91-100, 105-111, 125-132, 170-176, 179-189, 194-204, 223-229, 235-245, 259-276, 282-289, 303-313, 318-326, 334-345, 350-356, 364-370, 387-405, 409-422, 424-430, 442-457, 459-465, 490-516, 521-532, 534-541, 566-571, 1-208, 230-310, 315-438, 440-456, 467-580, 186-238, and 398-572 of SEQ ID NO 243; amino acids 14-20, 28-35, 41-47, 52-61, 73-86, 92-103, 124-141, 143-158, 172-180, 185-191, 193-221, 239-250, 262-273, 280-290, 304-324, 328-357, 367-376, 378-384, 394-401, 420-428, 439-458, 460-469, 474-492, 22-125, 130-150, 157-177, 179-368, 403-495, 59-74, 94-141, 143-203, and 297-362 of SEQ ID NO 244; amino acids 8-17, 25-39, 41-67, 69-85, 93-115, 123-143, 145-157, 166-174, 178-185, 188-199, 204-210, 221-238, 245-252, 257-268, 284-290, 294-306, 312-320, 1-170, 175-247, 261-323, 17-28, 61-99, and 221-240 of SEQ ID NO 245; amino acids 5-14, 16-26, 28-45, 54-60, 72-82, 98-104, 106-114, 121-132, 137-164, 169-175, 188-194, 214-220, 233-239, 283-296, 302-310, 336-347, 357-364, 400-407, 419-425, 433-439, 443-452, 464-470, 492-499, 511-521, 528-534, 536-548, 564-571, 577-595, 597-611, 615-623, 637-649, 652-670, 681-700, 716-724, 726-738, 766-792, 806-833, 839-851, 853-872, 880-899, 905-912, 919-927, 935-956, 958-970, 980-988, 990-995, 1004-1013, 1017-1031, 1033-1039, 1043-1055, 1059-1068, 1087-1093, 1105-1114, 1116-1122, 1128-1134, 1149-1158, 1164-1172, 1197-1204, 1208-1215, 1230-1244, 1284-1290, 8-53, 68-252, 265-283, 287-320, 329-353, 357-383, 389-470, 475-495, 507-527, 534-749, 773-870, 876-898, 906-928, 938-1150, 1153-1255, 1267-1287, 1291-1314, 291-408, 411-425, 500-552, 719-741, 975-1034, 1089-1156, 1203-1234, and 1273-1301 of SEQ ID NO 246; amino acids 9-20, 25-40, 48-61, 70-84, 89-113, 116-145, 161-181, 183-193, 196-212, 217-229, 235-246, 251-276, 284-290, 300-325, 338-349, 365-376, 387-393, 401-421, 429-438, 448-458, 6-382, 385-465, 204-286, and 310-463 of SEQ ID NO 247; amino acids 9-47, 52-61, 63-76, 82-88, 95-106, 112-126, 132-138, 145-154, 162-176, 178-223, 228-234, 236-247, 253-290, 300-307, 311-325, 327-347, 353-361, 379-408, 426-436, 454-460, 490-504, 506-517, 526-532, 539-545, 550-574, 580-591, 598-612, 616-622, 625-634, 652-668, 670-679, 682-688, 1-463, 466-510, 519-641, 647-702, 7-54, 198-314, 333-381, 404-452, and 523-549 of SEQ ID NO 248; amino acids 4-20, 24-38, 40-64, 66-85, 8-88, and 15-72 of SEQ ID NO 249; amino acids 6-15, 28-33, 35-46, 54-65, 74-108, 141-146, 172-178, 204-217, 221-231, 242-248, 251-257, 276-294, 298-304, 316-332, 341-353, 356-363, 369-382, 3-44, 64-172, 175-191, 202-348, 56-110, 143-224, and 252-308 of SEQ ID NO 250; amino acids 4-28, 49-60, 66-71, 158-164, 215-221, 254-275, 288-294, 318-326, 338-344, 366-380, 389-395, 400-421, 423-430, 450-458, 465-470, 474-491, 495-504, 512-517, 543-563, 577-582, 587-594, 617-623, 631-637, 644-652, 677-691, 694-700, 705-733, 748-783, 791-819, 833-840, 847-854, 876-886, 1-39, 46-64, 80-100, 105-130, 142-162, 166-233, 249-342, 352-467, 470-511, 539-591, 596-687, 689-859, and 609-738 of SEQ ID NO 251; amino acids 7-31, 42-54, 56-64, 94-110, 112-122, 128-136, 172-195, 198-224, 256-263, 281-287, 298-310, 340-346, 356-372, 1-147, 155-276, 278-319, 329-387, 391-405, and 87-164 of SEQ ID NO 252; amino acids 4-20, 33-41, 58-65, 78-86, 93-100, 102-108, 114-161, 194-200, 202-212, 218-225, 230-235, 243-250, 269-278, 291-301, 312-317, 329-340, 352-375, 416-422, 427-434, 443-453, 468-476, 481-491, 510-532, 537-554, 560-566, 574-588, 612-623, 653-663, 678-702, 721-728, 742-748, 770-778, 796-805, 807-817, 824-832, 856-864, 871-878, 885-900, 1-20, 27-172, 175-195, 218-270, 276-308, 334-388, 409-449, 451-712, 741-824, 828-913, 16-32, 133-197, 277-385, 556-573, and 798-874 of SEQ ID NO 253; amino acids 7-14, 17-30, 35-40, 62-69, 80-86, 88-99, 109-118, 120-133, 154-179, 203-209, 216-226, 237-245, 253-260, 265-273, 286-291, 315-339, 353-371, 390-398, 412-430, 435-448, 456-464, 476-487, 492-503, 522-533, 537-549, 579-590, 606-622, 648-654, 664-679, 681-692, 700-711, 718-730, 743-752, 763-798, 808-815, 823-838, 846-864, 891-925, 927-933, 935-948, 25-79, 83-126, 151-284, 292-408, 415-511, 532-577, 594-627, 634-735, 740-809, 815-866, 885-916, 53-163, 191-246, 457-515, 520-528, 620-642, 759-800, and 894-943 of SEQ ID NO 254; amino acids 21-31, 48-58, 60-66, 83-89, 102-115, 144-154, 159-168, 175-186, 195-200, 206-218, 244-250, 259-272, 293-299, 301-307, 324-330, 339-348, 358-369, 380-391, 404-421, 429-437, 456-467, 481-486, 495-502, 509-533, 536-550, 553-571, 575-580, 599-620, 1-93, 98-116, 118-149, 174-199, 202-302, 319-393, 410-468, 493-578, 582-623, 251-272, 290-363, and 424-502 of SEQ ID NO 255; amino acids 12-19, 30-48, 55-61, 66-74, 103-115, 117-131, 176-183, 192-197, 200-222, 8-52, 80-171, 173-201, 208-237, 240-258, 15-64, 77-168, and 190-252 of SEQ ID NO 256; amino acids 4-19, 31-58, 61-70, 84-96, 104-112, 131-138, 143-165, 168-178, 197-208, 213-220, 255-268, 273-281, 313-320, 334-354, 359-367, 369-376, 382-399, 406-420, 429-439, 441-461, 463-507, 513-544, 550-557, 569-580, 583-589, 598-618, 640-650, 675-680, 683-711, 713-739, 797-805, 1-55, 59-164, 168-185, 193-238, 244-333, 343-375, 378-517, 521-583, 602-656, 670-761, 788-808, 124-151, 326-341, and 567-720 of SEQ ID NO 257; amino acids 5-12, 22-37, 47-75, 78-94, 102-107, 110-118, 124-130, 140-154, 161-166, 185-193, 205-213, 218-237, 244-257, 264-269, 276-283, 289-315, 317-323, 334-341, 1-105, 121-344, 141-168, and 256-313 of SEQ ID NO 258; amino acids 33-48, 56-63, 65-79, 84-101, 109-122, 127-160, 211-216, 224-229, 239-256, 1-108, 110-265, 4-75, and 108-199 of SEQ ID NO 259; amino acids 6-14, 24-40, 47-60, 79-98, 102-108, 114-120, 122-132, 154-160, 168-179, 187-206, 221-226, 231-253, 255-268, 296-314, 316-337, 341-347, 357-378, 383-407, 418-425, 443-452, 456-462, 485-495, 503-510, 512-523, 533-543, 550-555, 1-101, 115-152, 154-203, 210-314, 321-368, 375-412, 414-434, 438-494, 497-529, 544-558, 35-136, and 348-355 of SEQ ID NO 260; amino acids 4-11, 14-22, 24-29, 33-40, 42-52, 54-70, 87-111, 121-128, 132-143, 149-168, 180-190, 197-215, 223-232, 244-251, 296-319, 328-349, 363-368, 378-399, 414-431, 434-440, 451-457, 1-27, 29-48, 59-199, 206-257, 264-378, 398-459, and 322-374 of SEQ ID NO 261; amino acids 4-20, 28-34, 36-42, 56-72, 80-86, 97-110, 118-127, 132-138, 145-150, 173-179, 181-195, 232-244, 250-263, 270-276, 308-314, 324-331, 336-343, 355-364, 398-403, 1-37, 52-81, 93-152, 173-252, 266-406, 29-90, and 125-197 of SEQ ID NO 262; amino acids 15-23, 31-38, 51-66, 89-105, 123-130, 135-140, 149-154, 198-208, 212-220, 228-239, 249-257, 261-267, 275-281, 300-310, 322-343, 354-365, 372-384, 394-404, 409-420, 422-429, 446-455, 459-468, 1-87, 104-194, 199-392, 404-425, 443-466, 82-164, 236-325, and 392-453 of SEQ ID NO 263; amino acids 4-10, 17-46, 51-80, 87-92, 99-121, 135-150, 170-176, 200-212, 243-252, 277-282, 310-331, 340-349, 1-160, 168-188, 200-263, 276-355, and 126-294 of SEQ ID NO 264; amino acids 4-18, 35-48, 52-67, 73-80, 90-96, 108-147, 156-171, 188-207, 227-234, 239-248, 263-286, 301-330, 347-363, 365-395, 409-419, 421-431, 442-447, 454-468, 471-482, 484-510, 517-525, 545-555, 1-62, 84-178, 182-264, 295-396, 403-452, 461-502, 520-568, 53-62, 112-187, 233-265, and 375-402 of SEQ ID NO 265; amino acids 13-31, 36-48, 54-64, 67-83, 93-104, 106-126, 128-137, 144-154, 161-169, 179-196, 205-221, 232-255, 257-263, 265-305, 307-324, 326-340, 354-367, 372-378, 383-402, 14-409, 23-124, and 134-172 of SEQ ID NO 266; amino acids 5-21, 26-35, 37-44, 57-69, 71-78, 84-93, 95-101, 1-78, 81-112, and 41-103 of SEQ ID NO 267; amino acids 13-19, 21-42, 47-55, 57-66, 68-74, 77-82, 84-90, 92-101, 106-112, 147-169, 171-183, 185-200, 221-230, 240-252, 269-275, 284-296, 299-308, 311-322, 332-342, 344-358, 374-382, 386-391, 403-412, 445-451, 462-477, 484-494, 557-563, 565-574, 1-47, 50-65, 80-108, 121-135, 145-234, 236-322, 326-379, 396-488, 502-522, 564-589, 14-77, 217-269, and 380-542 of SEQ ID NO 268; amino acids 4-34, 36-44, 51-57, 63-68, 70-80, 91-130, 136-173, 186-193, 195-201, 207-213, 226-234, 242-266, 268-284, 290-308, 315-332, 368-378, 386-402, 413-437, 1-87, 89-172, 175-193, 222-244, 247-366, 381-409, 416-437, 191-197, and 350-438 of SEQ ID NO 269; amino acids 11-24, 29-51, 61-91, 98-116, 119-129, 132-142, 10-66, 69-102, 111-145, and 2-98 of SEQ ID NO 270; amino acids 16-49, 55-74, 78-88, 91-112, 119-127, 140-145, 156-165, 167-173, 199-209, 234-249, 251-263, 265-272, 282-290, 299-305, 322-330, 1-333, 32-89, 108-141, and 246-333 of SEQ ID NO 271; amino acids 19-43, 49-55, 78-92, 1-65, 68-113, and 45-108 of SEQ ID NO 272; amino acids 15-23, 52-84, 97-103, 110-133, 149-154, 160-183, 203-227, 233-241, 243-250, 313-330, 338-351, 373-382, 384-396, 401-407, 425-452, 469-474, 476-482, 490-513, 519-528, 533-545, 591-613, 619-649, 23-105, 115-152, 154-220, 226-263, 276-296, 302-368, 378-402, 414-477, 481-536, 539-581, 588-652, 158-222, 327-423, and 427-526 of SEQ ID NO 273; amino acids 4-11, 19-29, 43-52, 82-96, 101-110, 138-144, 157-165, 258-268, 326-334, 336-344, 346-358, 377-383, 386-394, 397-405, 413-427, 429-434, 437-443, 449-458, 486-495, 514-521, 535-546, 554-560, 566-578, 589-596, 603-612, 618-625, 644-659, 662-671, 675-680, 707-720, 722-735, 737-752, 754-771, 788-802, 816-830, 836-844, 851-870, 884-909, 39-105, 132-176, 183-247, 258-292, 300-324, 328-398, 405-506, 512-532, 544-653, 659-838, 840-885, 78-130, 215-292, 655-713, and 818-880 of SEQ ID NO 274; amino acids 5-14, 21-27, 29-37, 46-72, 83-96, 113-121, 129-134, 1-63, 81-141, and 58-141 of SEQ ID NO 275; amino acids 4-9, 20-34, 36-54, 88-94, 124-148, 155-161, 182-202, 204-211, 220-232, 1-53, 75-116, 126-174, 177-235, and 92-234 of SEQ ID NO 276; amino acids 4-22, 31-38, 49-55, 82-91, 1-24, 28-49, and 7-65 of SEQ ID NO 277; amino acids 4-28, 30-83, 85-92, 94-123, 125-157, 163-196, 216-234, 240-258, 260-289, 307-313, 315-323, 328-378, 392-424, 428-440, 458-472, 474-482, 491-506, 508-530, 539-564, 1-298, 301-566, 14-31, and 282-347 of SEQ ID NO 278; amino acids 7-17, 20-28, 30-37, 39-47, 49-61, 77-96, 114-128, 149-154, 166-180, 182-200, 240-248, 256-271, 1-158, 163-275, 60-112, and 149-246 of SEQ ID NO 279; amino acids 6-25, 31-37, 43-57, 63-72, 82-90, 96-107, 109-118, 123-140, 144-149, 155-162, 168-182, 184-190, 213-219, 237-244, 247-256, 262-268, 271-284, 295-301, 307-320, 325-337, 346-364, 1-46, 48-196, 208-231, 234-278, 290-374, and 184-277 of SEQ ID NO 280; amino acids 27-46, 53-77, 103-123, 130-142, 153-159, 171-179, 182-209, 215-222, 224-233, 237-243, 271-276, 2-210, 215-271, and 12-138 of SEQ ID NO 281; amino acids 17-24, 38-45, 49-67, 80-86, 94-112, 119-141, 154-159, 165-171, 183-200, 218-226, 234-252, 263-291, 328-336, 338-349, 357-385, 397-405, 423-440, 445-453, 457-466, 470-477, 487-493, 8-134, 141-167, 175-224, 231-473, 479-496, 284-393, and 462-469 of SEQ ID NO 282; amino acids 4-9, 16-23, 56-64, 70-82, 86-93, 1-20, 39-103, and 11-36 of SEQ ID NO 283; amino acids 5-38, 69-77, 83-99, 143-151, 154-160, 176-186, 198-210, 226-268, 270-288, 293-303, 305-324, 327-342, 344-353, 388-394, 432-438, 1-49, 54-69, 96-110, 130-248, 251-270, 312-368, 382-450, 65-116, 179-231, and 328-395 of SEQ ID NO 284; amino acids 8-23, 58-70, 74-80, 85-91, 95-103, 110-127, 143-150, 153-160, 164-171, 189-201, 218-224, 228-233, 236-242, 248-255, 1-27, 30-46, 53-71, 77-171, 181-264, and 3-91 of SEQ ID NO 285; amino acids 4-19, 30-49, 57-83, 88-100, 111-119, 122-129, 154-159, 168-173, 189-200, 222-229, 237-243, 251-259, 1-22, 33-51, 55-99, 114-139, 163-204, 220-250, and 108-262 of SEQ ID NO 286; amino acids 4-19, 26-51, 53-62, 68-79, 83-96, 99-105, 114-122, 128-135, 138-146, 155-164, 180-199, 201-218, 226-232, 237-249, 257-264, 1-174, 176-277, and 47-117 of SEQ ID NO 287; amino acids 12-17, 23-31, 42-62, 81-88, 96-103, 109-118, 122-128, 136-146, 151-158, 188-203, 210-224, 229-238, 270-287, 296-308, 310-333, 341-354, 361-368, 383-395, 404-420, 423-435, 443-456, 460-503, 510-517, 521-526, 541-548, 565-570, 575-586, 606-617, 625-637, 648-655, 683-696, 702-713, 722-728, 740-748, 779-786, 789-801, 807-812, 820-829, 849-854, 862-868, 9-61, 75-124, 132-288, 299-547, 592-608, 612-660, 666-695, 733-753, 776-813, 818-854, 858-875, 59-133, 260-272, 382-410, 440-515, and 711-872 of SEQ ID NO 288; amino acids 15-24, 28-56, 63-87, 98-104, 112-121, 125-133, 142-159, 166-176, 189-198, 200-207, 216-223, 225-231, 236-243, 245-252, 262-287, 295-304, 315-323, 326-332, 340-356, 361-368, 370-376, 387-398, 401-410, 412-420, 422-434, 442-455, 469-476, 486-496, 507-514, 519-527, 547-556, 559-564, 569-575, 588-594, 604-609, 611-622, 634-662, 676-686, 712-718, 723-738, 752-758, 779-790, 793-822, 833-850, 866-891, 894-908, 935-950, 1-155, 162-181, 186-321, 346-600, 608-760, 778-897, 910-953, 700-781, and 800-903 of SEQ ID NO 289; amino acids 25-31, 41-54, 79-86, 88-96, 111-125, 135-141, 145-152, 159-182, 188-195, 208-214, 257-267, 275-297, 306-312, 326-333, 342-358, 370-377, 399-414, 420-428, 434-439, 446-492, 499-507, 509-521, 527-533, 2-33, 36-217, 231-251, 263-363, 367-427, 430-527, 2-122, and 192-306 of SEQ ID NO 290; amino acids 6-13, 18-26, 28-46, 49-56, 62-69, 74-84, 88-110, 116-132, 135-149, 156-178, 181-191, 202-223, 247-260, 274-281, 295-303, 336-344, 368-375, 377-390, 395-404, 409-433, 450-458, 470-506, 1-83, 100-280, 295-370, 374-509, 63-151, 220-291, and 321-388 of SEQ ID NO 291; amino acids 4-11, 16-27, 31-41, 62-81, 101-108, 116-144, 169-185, 203-218, 228-234, 236-245, 255-273, 283-294, 298-304, 306-313, 315-340, 342-350, 357-371, 378-390, 402-416, 421-436, 444-456, 458-464, 481-487, 496-508, 510-531, 536-541, 544-551, 556-569, 576-590, 600-614, 627-636, 644-651, 664-670, 675-688, 700-720, 727-770, 775-797, 802-818, 828-835, 864-884, 887-892, 899-907, 918-928, 940-958, 965-980, 7-194, 202-235, 261-383, 401-505, 524-617, 624-727, 735-749, 761-879, 898-973, 975-989, 96-113, 634-656, and 658-734 of SEQ ID NO 292; amino acids 4-12, 14-23, 26-35, 51-78, 83-94, 100-106, 109-119, 121-135, 140-149, 153-177, 179-202, 212-224, 229-239, 241-252, 260-312, 330-336, 342-352, 368-383, 393-403, 1-100, 105-343, 365-406, 76-101, and 295-353 of SEQ ID NO 293; amino acids 4-28, 31-38, 65-81, 1-84, and 9-69 of SEQ ID NO 294; amino acids 4-11, 26-35, 55-74, 78-90, 109-115, 125-141, 164-169, 173-181, 193-203, 212-231, 253-266, 289-295, 297-313, 350-356, 380-388, 410-416, 425-433, 449-462, 466-473, 478-497, 562-584, 586-606, 614-619, 718-724, 727-738, 745-752, 782-789, 812-821, 827-834, 844-854, 864-874, 902-908, 920-927, 952-957, 966-973, 982-988, 1010-1019, 1027-1034, 1050-1057, 1082-1088, 1111-1125, 1129-1135, 1150-1163, 1-104, 108-152, 161-190, 195-323, 337-366, 369-410, 415-449, 453-495, 532-552, 559-624, 677-697, 724-751, 784-802, 804-824, 834-931, 949-977, 979-999, 1060-1149, 378-625, and 795-908 of SEQ ID NO 295; amino acids 7-31, 36-49, 59-66, 78-85, 89-95, 101-120, 127-151, 174-183, 185-194, 207-217, 221-230, 238-247, 258-268, 290-297, 309-315, 1-42, 58-233, 236-279, 290-315, and 181-234 of SEQ ID NO 296; amino acids 17-25, 60-72, 80-90, 97-109, 111-117, 1-72, 74-120, and 22-110 of SEQ ID NO 297; amino acids 4-31, 44-53, 55-70, 76-99, 109-115, 123-130, 136-142, 147-155, 158-191, 199-220, 223-235, 243-257, 264-281, 286-299, 313-323, 350-365, 373-391, 397-441, 455-466, 1-35, 45-218, 225-323, 347-386, 388-403, 405-446, 448-469, 105-193, and 327-355 of SEQ ID NO 298; amino acids 4-19, 47-53, 69-75, 81-87, 109-122, 125-140, 142-156, 191-199, 219-238, 246-271, 279-290, 296-302, 305-313, 321-327, 331-345, 1-32, 75-89, 107-127, 133-171, 188-310, 325-349, 43-142, and 300-314 of SEQ ID NO 299; amino acids 4-43, 49-56, 66-74, 80-94, 97-110, 116-136, 139-145, 151-163, 165-178, 182-210, 213-220, 222-231, 241-252, 256-271, 277-293, 300-314, 330-336, 340-363, 369-375, 381-404, 419-426, 439-445, 447-453, 465-501, 1-38, 43-62, 77-137, 140-173, 179-291, 328-376, 386-400, 406-504, 19-76, 195-221, and 271-292 of SEQ ID NO 300; amino acids 4-19, 25-31, 40-63, 71-80, 89-98, 101-119, 125-151, 159-164, 173-201, 219-227, 247-258, 263-284, 308-319, 321-326, 10-99, 101-185, 200-294, 297-347, and 74-161 of SEQ ID NO 301; amino acids 12-18, 25-31, 37-43, 76-94, 121-135, 146-176, 191-199, 205-212, 259-290, 300-313, 340-347, 364-373, 375-385, 413-420, 424-430, 446-462, 465-473, 475-486, 505-522, 537-544, 557-563, 573-582, 588-602, 604-613, 620-630, 638-675, 677-683, 1-28, 33-134, 137-179, 181-221, 255-323, 333-439, 443-532, 537-692, 25-59, 156-270, 272-335, and 557-565 of SEQ ID NO 302; amino acids 10-22, 24-54, 63-70, 77-86, 94-110, 112-133, 1-60, 88-136, and 17-135 of SEQ ID NO 303; amino acids 7-24, 28-47, 76-86, 92-103, 122-129, 135-141, 152-157, 162-173, 192-205, 210-225, 230-236, 270-286, 289-297, 299-314, 316-328, 334-341, 349-356, 376-382, 384-395, 4-47, 50-248, 261-393, 61-67, 168-195, and 257-320 of SEQ ID NO 304; amino acids 4-9, 20-39, 42-48, 67-101, 129-135, 156-162, 170-176, 178-189, 192-197, 228-235, 260-266, 272-278, 291-301, 330-342, 347-360, 367-373, 383-390, 397-409, 432-443, 466-487, 506-517, 520-545, 551-561, 588-598, 602-608, 622-630, 15-126, 129-166, 171-217, 227-307, 309-361, 363-431, 461-496, 501-637, 172-215, 218-291, 417-440, and 498-574 of SEQ ID NO 305; amino acids 8-28, 34-67, 1-70, and 2-32 of SEQ ID NO 306; amino acids 9-26, 33-40, 79-93, 98-105, 112-121, 128-137, 144-156, 160-167, 183-190, 198-204, 210-224, 250-275, 283-289, 296-302, 314-321, 336-344, 346-353, 355-362, 367-380, 382-391, 393-403, 407-413, 416-423, 434-443, 469-492, 499-509, 550-559, 596-603, 613-633, 635-642, 648-659, 1-30, 33-99, 106-126, 129-331, 340-511, 522-565, 578-599, 608-667, 59-118, and 160-215 of SEQ ID NO 307; amino acids 7-20, 25-33, 36-64, 74-83, 117-124, 126-137, 146-159, 164-173, 181-186, 195-231, 240-255, 258-266, 268-276, 283-290, 5-90, 113-250, 260-293, 9-47, 145-198, and 227-239 of SEQ ID NO 308; amino acids 4-24, 31-41, 43-57, 61-68, 72-78, 83-88, 115-121, 123-135, 190-200, 214-224, 239-248, 291-299, 305-312, 328-333, 351-362, 1-101, 103-140, 202-263, 286-362, and 189-242 of SEQ ID NO 309; amino acids 4-21, 110-126, 128-134, 139-149, 1-29, 31-62, 65-94, 99-149, and 7-80 of SEQ ID NO 310; amino acids 4-9, 23-29, 37-52, 57-73, 80-98, 101-119, 146-163, 175-181, 198-208, 222-228, 243-249, 258-263, 269-278, 283-298, 309-324, 329-339, 342-353, 356-363, 365-374, 389-395, 397-404, 408-415, 424-429, 432-450, 457-490, 503-524, 526-556, 568-575, 584-592, 596-619, 621-646, 653-673, 675-694, 699-706, 1-104, 121-135, 143-176, 182-274, 281-301, 306-385, 393-502, 505-648, 654-709, 162-186, 309-397, 435-463, and 503-565 of SEQ ID NO 311; amino acids 5-21, 24-49, 51-63, 65-76, 111-117, 133-145, 149-156, 189-197, 217-230, 240-245, 288-295, 297-316, 321-335, 339-346, 369-382, 401-421, 1-89, 106-125, 129-207, 210-230, 255-357, 360-453, 166-220, and 369-473 of SEQ ID NO 312; amino acids 4-11, 22-37, 39-54, 62-70, 78-84, 94-100, 106-111, 1-51, 59-102, and 41-100 of SEQ ID NO 313; amino acids 16-26, 29-46, 48-54, 94-101, 103-110, 117-125, 134-148, 156-180, 190-196, 221-239, 1-35, 61-81, 88-116, 139-205, 207-227, and 43-75 of SEQ ID NO 314; amino acids 5-19, 21-27, 30-35, 40-57, 67-75, 104-114, 121-130, 152-161, 167-175, 187-205, 219-227, 244-250, 1-76, 83-155, 158-191, 218-253, and 15-137 of SEQ ID NO 315; amino acids 15-38, 40-49, 57-66, 68-76, 80-88, 91-109, 117-122, 148-154, 161-169, 195-214, 220-230, 233-241, 263-269, 285-293, 301-312, 324-340, 349-367, 372-386, 398-407, 426-434, 436-443, 446-452, 456-476, 478-498, 510-517, 523-550, 558-565, 589-604, 610-619, 634-639, 659-668, 680-688, 698-704, 732-739, 741-754, 758-767, 783-796, 800-812, 816-826, 842-860, 1-83, 85-115, 136-179, 192-223, 257-360, 375-486, 501-527, 530-618, 626-644, 653-867, 598-632, 690-700, and 772-833 of SEQ ID NO 316; amino acids 4-12, 41-49, 61-66, 111-118, 123-128, 139-144, 159-166, 178-185, 206-214, 236-248, 262-268, 275-293, 297-314, 348-360, 368-399, 1-68, 71-150, 193-226, 230-296, 305-406, 37-125, and 272-341 of SEQ ID NO 317; amino acids 8-15, 18-54, 61-80, 109-114, 143-149, 153-160, 172-185, 188-194, 196-207, 221-230, 238-244, 273-279, 291-297, 305-319, 325-333, 342-362, 17-110, 118-139, 149-238, 247-365, 62-107, and 123-182 of SEQ ID NO 318; amino acids 15-28, 34-59, 105-135, 137-144, 155-184, 187-212, 221-233, 240-260, 267-278, 286-291, 299-315, 319-334, 1-32, 39-55, 76-122, 124-279, 282-337, 50-100, 116-176, and 261-288 of SEQ ID NO 319; amino acids 4-22, 43-56, 71-108, 119-125, 127-138, 146-155, 164-171, 173-181, 190-199, 214-234, 1-36, 57-112, 121-181, 190-241, and 4-108 of SEQ ID NO 320; amino acids 11-19, 24-31, 37-42, 61-71, 85-91, 94-100, 105-115, 123-138, 140-148, 153-161, 164-173, 185-192, 194-202, 212-222, 227-233, 244-250, 276-287, 298-304, 309-315, 319-330, 342-353, 367-374, 387-394, 403-425, 439-445, 514-520, 528-543, 545-553, 569-584, 586-595, 603-621, 8-273, 283-299, 309-346, 367-490, 494-537, 558-632, 17-74, 155-189, 220-302, 418-540, and 550-612 of SEQ ID NO 321; amino acids 4-20, 41-47, 49-56, 68-86, 95-101, 108-121, 123-137, 145-150, 158-178, 187-198, 218-226, 231-237, 240-250, 252-262, 269-282, 287-317, 1-62, 70-209, 217-319, 140-149, 174-233, and 243-300 of SEQ ID NO 322; amino acids 16-21, 29-36, 43-61, 68-84, 89-136, 159-197, 206-216, 224-240, 244-251, 270-286, 292-307, 313-323, 327-332, 339-364, 388-395, 402-409, 423-440, 448-461, 464-476, 1-15, 19-260, 292-312, 314-451, 465-483, 242-272, and 435-457 of SEQ ID NO 323; amino acids 8-28, 30-35, 55-64, 69-79, 87-95, 132-143, 161-177, 186-198, 222-227, 247-258, 266-288, 340-352, 1-40, 44-96, 103-154, 158-177, 181-202, 208-268, 272-355, 158-168, and 286-334 of SEQ ID NO 324; amino acids 5-24, 39-46, 50-64, 79-89, 103-109, 116-133, 137-150, 159-167, 169-177, 184-202, 209-229, 245-254, 272-282, 294-301, 340-356, 368-378, 388-395, 429-444, 450-463, 484-490, 536-545, 547-557, 565-601, 615-627, 648-655, 1-33, 35-108, 118-236, 245-260, 264-324, 329-358, 360-397, 448-485, 492-536, 541-599, 607-669, 162-181, 331-422, 481-534, and 591-669 of SEQ ID NO 325; amino acids 26-55, 58-73, 75-81, 87-96, 131-140, 150-158, 6-151, and 15-96 of SEQ ID NO 326; amino acids 4-9, 43-52, 63-71, 97-104, 117-125, 130-136, 143-161, 167-179, 185-191, 194-201, 205-211, 219-225, 240-245, 247-256, 261-279, 286-301, 323-338, 340-349, 359-370, 390-397, 399-414, 439-473, 485-496, 505-521, 534-561, 566-571, 575-588, 598-606, 623-629, 653-665, 675-680, 683-690, 692-700, 730-755, 769-798, 802-815, 818-826, 852-859, 862-875, 27-88, 90-173, 176-283, 303-404, 421-443, 473-487, 507-540, 544-642, 645-673, 677-761, 767-840, 843-878, 24-123, 243-316, 430-472, and 512-571 of SEQ ID NO 327; amino acids 40-55, 59-119, 145-180, 182-210, 215-230, 264-274, 293-305, 308-314, 316-328, 339-346, 348-354, 388-393, 395-414, 416-425, 431-436, 442-451, 467-473, 477-487, 491-498, 505-513, 519-542, 548-565, 1-336, 344-379, 395-438, 440-457, 476-571, 230-331, and 454-460 of SEQ ID NO 328; amino acids 5-24, 32-46, 72-77, 83-98, 100-106, 113-135, 140-150, 154-170, 176-199, 218-240, 259-278, 282-301, 307-323, 379-386, 389-430, 449-457, 465-484, 504-520, 537-561, 568-581, 1-321, 323-344, 353-371, 374-588, 341-374, and 406-416 of SEQ ID NO 329; amino acids 11-20, 27-37, 39-54, 67-73, 79-89, 92-102, 112-120, 125-138, 145-152, 172-178, 181-191, 193-204, 213-220, 222-235, 241-257, 281-288, 298-306, 331-359, 361-403, 420-426, 434-456, 462-470, 477-484, 497-504, 520-527, 535-548, 566-575, 584-592, 606-613, 624-629, 635-651, 654-660, 683-694, 697-703, 714-725, 728-757, 767-779, 787-794, 801-814, 834-843, 858-867, 869-875, 888-899, 912-933, 936-946, 3-31, 36-63, 66-80, 103-208, 231-299, 307-399, 445-517, 528-586, 597-618, 632-652, 661-742, 745-781, 785-852, 855-893, 909-947, 293-326, 691-787, and 896-950 of SEQ ID NO 330; amino acids 4-21, 29-46, 61-77, 81-88, 1-88, and 24-78 of SEQ ID NO 331; amino acids 8-41, 48-53, 73-78, 81-98, 115-140, 143-149, 154-162, 182-196, 207-215, 221-226, 230-239, 257-264, 268-276, 287-303, 1-49, 69-149, 161-227, 230-306, 39-67, and 77-105 of SEQ ID NO 332; amino acids 4-11, 16-23, 31-39, 64-79, 82-89, 98-105, 111-117, 136-146, 162-168, 186-193, 196-205, 219-236, 268-287, 289-300, 308-314, 323-339, 349-365, 368-374, 1-51, 93-245, 259-377, 3-9, 107-183, and 210-318 of SEQ ID NO 333; amino acids 4-28, 35-48, 56-64, 91-125, 135-143, 150-159, 1-26, 54-136, 144-167, and 14-88 of SEQ ID NO 334; amino acids 4-16, 21-39, 53-83, 88-93, 99-133, 152-164, 167-187, 192-209, 211-231, 245-273, 278-284, 289-304, 317-333, 335-341, 346-353, 359-366, 378-389, 394-402, 424-438, 447-460, 473-480, 482-492, 494-500, 506-520, 523-541, 558-574, 577-588, 598-605, 611-619, 622-629, 633-643, 649-669, 685-701, 707-727, 735-749, 768-780, 783-789, 798-810, 1-153, 178-240, 254-282, 284-349, 366-446, 450-784, 794-813, 79-169, 194-251, and 451-509 of SEQ ID NO 335; amino acids 4-30, 38-46, 56-70, 80-90, 101-110, 117-123, 149-157, 162-172, 178-191, 211-218, 230-256, 261-283, 292-310, 335-344, 348-354, 361-369, 382-396, 403-414, 425-431, 452-458, 460-472, 484-504, 508-514, 524-541, 562-580, 597-603, 627-643, 645-657, 688-696, 707-713, 719-736, 746-759, 769-775, 791-797, 802-812, 824-830, 838-847, 856-864, 880-901, 909-916, 1-52, 64-78, 81-202, 221-297, 335-381, 384-454, 464-552, 559-590, 598-620, 622-644, 646-668, 672-821, 833-898, 25-108, and 505-560 of SEQ ID NO 336; amino acids 16-24, 37-46, 60-73, 79-90, 97-116, 130-141, 143-150, 155-161, 179-186, 193-206, 212-225, 230-253, 258-267, 290-296, 306-344, 366-381, 383-390, 398-405, 418-425, 438-449, 465-482, 489-499, 503-509, 530-543, 545-567, 7-44, 51-79, 81-114, 116-263, 285-307, 311-351, 379-416, 427-482, 491-509, 535-570, 126-230, 248-286, 364-508, and 510-517 of SEQ ID NO 337; amino acids 4-10, 13-21, 27-40, 90-95, 121-128, 197-203, 239-246, 253-259, 305-311, 322-336, 349-356, 358-364, 372-379, 393-408, 411-417, 427-434, 457-467, 481-490, 492-497, 504-513, 533-542, 561-571, 592-600, 641-646, 661-667, 671-682, 711-720, 722-734, 763-771, 779-796, 833-838, 855-865, 873-879, 886-896, 901-908, 913-924, 931-939, 1-19, 24-55, 88-108, 118-153, 172-190, 198-281, 299-361, 369-392, 430-578, 661-689, 698-738, 795-850, 861-901, 904-924, 927-946, 37-262, 272-351, 453-474, 499-518, 527-547, 569-643, and 897-954 of SEQ ID NO 338; amino acids 22-28, 39-49, 4-20, 26-44, and 5-65 of SEQ ID NO 339; amino acids 4-39, 52-63, 70-88, 97-112, 1-88, 94-125, and 56-113 of SEQ ID NO 340; amino acids 10-29, 35-40, 46-62, 77-84, 94-129, 146-153, 158-164, 166-174, 196-202, 209-215, 225-240, 250-258, 272-287, 305-313, 318-335, 339-353, 362-381, 384-390, 395-424, 439-452, 454-463, 467-476, 482-496, 504-529, 535-562, 564-573, 576-588, 596-602, 604-619, 625-658, 664-675, 685-696, 714-727, 746-758, 770-777, 780-789, 793-799, 845-861, 863-873, 890-901, 905-910, 921-934, 1-30, 35-106, 117-348, 357-381, 390-551, 553-800, 804-835, 844-882, 893-937, 231-286, 394-429, and 686-758 of SEQ ID NO 341; amino acids 8-31, 35-70, 83-89, 91-102, 108-116, 130-156, 169-191, 203-217, 238-256, 270-292, 298-311, 315-331, 335-345, 364-370, 376-382, 384-401, 405-419, 421-430, 434-441, 445-452, 467-481, 503-511, 516-522, 524-531, 534-539, 547-560, 570-582, 5-104, 122-260, 271-340, 353-564, 566-603, 106-129, 215-224, and 454-522 of SEQ ID NO 342; amino acids 8-27, 29-37, 42-49, 63-69, 74-80, 95-118, 140-148, 156-170, 189-195, 197-209, 218-223, 227-235, 247-255, 268-275, 294-299, 305-313, 316-333, 347-359, 369-376, 381-386, 399-410, 423-432, 436-455, 462-475, 524-537, 578-588, 597-605, 616-622, 624-634, 636-644, 648-655, 657-665, 693-698, 706-723, 726-732, 736-778, 782-805, 820-832, 835-846, 848-870, 882-909, 927-933, 951-957, 962-971, 976-982, 986-1001, 1016-1021, 1042-1050, 1054-1061, 1066-1075, 1-68, 84-100, 152-182, 198-344, 348-413, 416-552, 558-621, 624-788, 800-892, 958-1060, 1064-1078, 155-209, 427-501, 658-688, 809-841, 862-871, and 927-1010 of SEQ ID NO 343; amino acids 15-36, 55-67, 70-76, 81-88, 110-125, 128-134, 136-188, 197-214, 216-223, 244-250, 257-263, 265-280, 300-306, 311-319, 2-36, 52-72, 82-152, 156-188, 191-225, 232-322, 21-78, 90-154, and 168-215 of SEQ ID NO 344; amino acids 4-25, 32-41, 51-58, 71-78, 81-89, 101-123, 130-138, 140-151, 165-171, 176-193, 202-214, 244-259, 266-282, 285-293, 295-301, 316-325, 329-334, 344-350, 381-390, 405-415, 423-431, 1-120, 126-160, 173-257, 266-313, 322-342, 354-434, 8-56, and 181-269 of SEQ ID NO 345; amino acids 4-46, 53-60, 74-86, 97-104, 121-128, 149-160, 206-217, 252-258, 274-280, 287-294, 311-327, 356-370, 378-383, 394-403, 425-432, 434-447, 473-484, 491-502, 543-556, 599-608, 610-623, 641-657, 671-684, 698-707, 719-733, 748-758, 772-779, 798-808, 814-820, 830-843, 854-866, 872-884, 891-899, 901-907, 920-932, 1-91, 114-128, 130-149, 156-190, 207-306, 308-330, 342-429, 436-450, 454-662, 666-937, 103-238, 247-273, 451-470, 687-734, and 753-796 of SEQ ID NO 346; amino acids 35-41, 52-58, 66-74, 78-87, 92-99, 101-109, 120-132, 153-164, 176-182, 186-194, 208-238, 246-262, 272-284, 291-311, 317-322, 328-343, 4-104, 112-131, 150-214, 216-345, 36-58, and 282-336 of SEQ ID NO 347; amino acids 5-27, 29-42, 57-71, 73-80, 92-99, 101-107, 126-136, 142-151, 155-163, 173-179, 214-232, 235-254, 262-274, 297-309, 311-323, 330-358, 362-379, 383-394, 396-416, 432-457, 464-472, 474-485, 487-498, 511-519, 527-536, 1-35, 53-118, 123-280, 283-440, 442-542, and 22-120 of SEQ ID NO 348; amino acids 4-15, 27-61, 64-77, 84-97, 102-122, 144-215, 223-239, 242-252, 257-263, 271-286, 295-302, 312-324, 328-348, 380-400, 403-411, 417-428, 434-440, 444-451, 453-467, 485-496, 522-538, 540-545, 552-560, 566-577, 582-588, 1-149, 151-408, 442-594, and 324-391 of SEQ ID NO 349; amino acids 21-41, 43-123, 125-137, 139-157, 171-190, 193-203, 205-226, 242-256, 264-274, 289-299, 301-311, 323-368, 375-396, 400-408, 418-434, 1-437, 84-149, 163-176, and 260-321 of SEQ ID NO 350; amino acids 4-11, 19-34, 44-65, 70-115, 130-140, 142-168, 170-176, 185-206, 221-227, 1-65, 81-124, 127-206, 215-232, and 157-215 of SEQ ID NO 351; amino acids 4-19, 44-51, 66-104, 122-129, 136-141, 143-150, 154-159, 166-173, 181-205, 207-218, 1-15, 21-119, 123-213, and 77-182 of SEQ ID NO 352; amino acids 4-15, 17-34, 40-51, 61-71, 84-89, 137-146, 153-159, 163-170, 175-191, 203-210, 216-228, 242-250, 259-271, 279-284, 291-329, 333-372, 376-394, 399-404, 406-412, 416-424, 446-451, 1-76, 82-168, 179-209, 227-249, 253-473, and 234-319 of SEQ ID NO 353; amino acids 8-15, 17-26, 30-45, 47-74, 80-92, 94-111, 114-120, 124-133, 148-173, 175-181, 183-196, 198-208, 212-231, 238-244, 248-262, 266-285, 290-302, 308-317, 327-332, 334-341, 346-355, 357-365, 373-380, 1-47, 68-99, 104-174, 178-378, and 135-280 of SEQ ID NO 354; amino acids 12-28, 32-56, 61-72, 74-89, 95-128, 130-144, 150-163, 177-189, 196-214, 218-282, 294-305, 313-382, 384-398, 404-420, 426-454, 456-461, 1-224, 229-283, 296-464, and 350-406 of SEQ ID NO 355; amino acids 6-17, 22-31, 35-63, 67-85, 89-101, 128-147, 149-155, 161-170, 172-179, 187-198, 228-234, 240-247, 284-291, 298-308, 326-337, 344-350, 357-366, 1-28, 30-82, 86-267, 271-307, 310-376, 5-136, and 172-260 of SEQ ID NO 356; amino acids 9-32, 36-52, 72-90, 149-157, 165-177, 188-196, 223-233, 237-245, 264-273, 280-293, 298-307, 309-348, 352-362, 366-374, 381-396, 405-413, 416-421, 428-435, 438-444, 449-457, 464-476, 491-555, 579-597, 602-628, 646-652, 663-670, 674-692, 739-747, 762-771, 779-789, 809-816, 1-40, 49-69, 72-92, 97-265, 271-369, 373-452, 456-476, 496-527, 535-555, 567-637, 652-819, 297-327, 539-627, and 712-776 of SEQ ID NO 357; amino acids 5-16, 21-27, 39-46, 60-77, 92-104, 112-118, 129-136, 141-164, 167-176, 178-214, 220-228, 234-251, 284-301, 303-310, 315-328, 336-353, 362-375, 380-390, 393-409, 411-417, 430-438, 448-459, 461-468, 1-15, 53-86, 89-225, 237-320, 331-398, 406-467, 107-184, and 256-311 of SEQ ID NO 358; amino acids 13-34, 36-42, 49-62, 86-92, 124-130, 132-145, 1-38, 41-140, and 4-89 of SEQ ID NO 359; amino acids 16-22, 45-51, 80-85, 88-108, 115-127, 139-157, 160-176, 184-189, 198-204, 227-234, 249-270, 277-295, 314-325, 331-337, 344-367, 397-424, 432-500, 512-521, 524-530, 555-563, 569-583, 586-617, 622-653, 661-673, 679-696, 710-738, 754-759, 764-786, 793-808, 813-820, 831-837, 844-850, 864-889, 891-899, 912-926, 961-970, 975-982, 1016-1024, 1027-1034, 1051-1059, 1096-1102, 1134-1147, 1158-1177, 1179-1185, 1188-1215, 1235-1250, 1271-1284, 1308-1315, 1-34, 79-113, 129-325, 327-360, 363-383, 385-514, 530-565, 577-701, 704-941, 944-981, 985-1005, 1012-1032, 1049-1088, 1097-1183, 1188-1320, 108-194, 370-410, 411-442, 956-1046, and 1055-1236 of SEQ ID NO 360; amino acids 20-32, 67-73, 84-91, 102-108, 148-163, 198-209, 232-237, 7-94, 98-116, 121-196, 205-224, 240-254, 113-132, and 167-245 of SEQ ID NO 361; amino acids 7-16, 36-43, 69-77, 101-114, 136-150, 155-161, 183-195, 197-206, 210-218, 225-237, 1-77, 97-156, 172-215, 221-240, and 92-164 of SEQ ID NO 362; amino acids 17-23, 52-62, 75-87, 107-112, 120-135, 140-146, 170-176, 188-206, 210-220, 228-255, 273-282, 304-314, 324-331, 344-355, 363-370, 2-35, 81-179, 181-264, 267-288, 292-376, 2-126, and 245-300 of SEQ ID NO 363; amino acids 4-9, 11-17, 24-85, 89-103, 114-119, 126-135, 151-158, 169-175, 191-203, 226-237, 247-256, 261-266, 278-283, 306-316, 321-331, 333-340, 350-358, 361-392, 397-408, 412-419, 1-113, 117-183, 186-275, 294-362, 370-448, 468-485, 63-136, 248-305, and 458-466 of SEQ ID NO 364; amino acids 4-23, 41-47, 52-59, 62-75, 86-92, 98-104, 106-112, 126-143, 152-157, 160-166, 183-192, 196-201, 207-214, 227-235, 238-245, 248-265, 276-285, 304-314, 324-342, 350-356, 360-375, 390-403, 411-435, 437-446, 453-461, 1-39, 43-79, 88-160, 165-236, 241-426, 434-470, 132-199, and 214-286 of SEQ ID NO 365; amino acids 8-31, 35-48, 75-98, 100-106, 128-134, 151-166, 168-177, 202-223, 252-257, 265-277, 288-302, 306-316, 371-377, 385-396, 408-413, 429-445, 472-480, 1-331, 352-386, 404-488, 80-156, and 237-303 of SEQ ID NO 366; amino acids 4-10, 22-32, 39-46, 52-69, 90-96, 104-117, 126-142, 148-161, 163-174, 178-195, 200-210, 216-222, 225-236, 238-246, 248-265, 279-285, 313-322, 324-336, 1-203, 205-339, 31-111, and 205-228 of SEQ ID NO 367; amino acids 6-26, 33-63, 66-74, 125-148, 153-185, 225-230, 234-250, 253-278, 286-299, 312-319, 335-346, 348-361, 383-401, 414-419, 423-430, 432-440, 447-454, 470-478, 488-508, 519-533, 537-554, 16-83, 126-172, 175-210, 245-325, 329-448, 469-557, 81-97, 197-371, and 470-500 of SEQ ID NO 368; amino acids 4-9, 11-32, 44-56, 68-74, 82-98, 104-109, 131-140, 144-164, 176-182, 188-194, 206-212, 219-225, 228-235, 237-244, 254-271, 277-287, 294-302, 312-318, 324-331, 341-350, 352-358, 399-405, 411-419, 438-447, 452-459, 465-470, 475-484, 486-506, 514-523, 525-532, 537-543, 1-73, 112-209, 231-294, 296-314, 326-381, 388-414, 423-457, 462-484, 495-514, 522-544, 547-568, and 495-559 of SEQ ID NO 369; amino acids 4-26, 29-36, 45-52, 57-63, 68-75, 77-88, 93-108, 114-120, 138-143, 148-155, 161-179, 198-211, 214-224, 229-242, 244-253, 268-274, 302-311, 319-331, 335-349, 364-374, 377-384, 388-394, 423-436, 441-446, 452-471, 478-501, 506-514, 522-546, 558-579, 589-604, 623-631, 1-36, 40-114, 125-255, 266-395, 413-511, 530-557, 564-583, 605-640, 54-144, and 543-627 of SEQ ID NO 370; amino acids 5-10, 24-30, 37-53, 62-94, 101-111, 118-125, 145-151, 156-162, 164-186, 191-198, 204-212, 224-233, 244-253, 263-269, 277-297, 304-322, 334-341, 355-372, 379-384, 393-406, 412-425, 427-435, 437-449, 461-471, 483-506, 515-527, 535-543, 546-559, 562-570, 576-584, 588-601, 640-647, 651-673, 681-689, 712-734, 1-63, 73-369, 371-428, 432-454, 457-567, 573-635, 655-698, 707-744, 600-685, and 741-753 of SEQ ID NO 371; amino acids 13-19, 27-38, 78-87, 105-129, 134-142, 151-179, 184-197, 206-214, 225-235, 246-265, 274-314, 322-330, 334-343, 1-47, 49-66, 70-96, 102-285, 287-322, 330-346, 14-57, 76-167, and 191-245 of SEQ ID NO 372; amino acids 15-21, 26-45, 49-60, 62-69, 77-87, 96-104, 108-114, 117-130, 135-144, 149-160, 174-181, 186-193, 203-218, 228-234, 236-242, 257-264, 285-326, 332-342, 344-349, 353-370, 373-425, 428-437, 447-457, 472-483, 490-505, 516-526, 546-554, 556-570, 572-585, 601-609, 613-624, 626-640, 647-663, 665-671, 678-689, 691-697, 707-719, 721-751, 769-778, 1-64, 73-192, 209-327, 329-418, 421-529, 534-586, 599-646, 650-682, 703-793, 86-169, 318-384, 502-520, and 529-602 of SEQ ID NO 373; amino acids 4-10, 19-26, 28-34, 41-60, 62-81, 89-97, 99-115, 143-156, 162-181, 186-193, 197-207, 225-231, 233-240, 254-266, 283-296, 309-323, 325-338, 341-352, 363-373, 388-413, 420-426, 1-37, 41-119, 133-251, 255-277, 291-355, 359-411, 93-182, and 360-391 of SEQ ID NO 374; amino acids 5-37, 48-77, 82-89, 91-102, 119-127, 129-138, 145-179, 186-194, 197-203, 205-212, 219-235, 243-250, 273-289, 294-304, 309-349, 352-363, 377-388, 391-399, 407-415, 418-443, 449-463, 471-477, 479-494, 496-503, 2-44, 85-108, 127-242, 245-259, 271-288, 291-329, 339-433, 443-457, 468-517, 34-88, 104-164, 168-227, 235-259, 279-301, and 345-377 of SEQ ID NO 375; amino acids 4-24, 32-39, 44-51, 60-70, 86-96, 98-105, 108-117, 122-138, 142-156, 167-181, 192-212, 214-223, 231-240, 254-278, 15-131, 139-285, 9-96, and 181-194 of SEQ ID NO 376; amino acids 12-31, 41-47, 50-73, 86-99, 103-109, 141-147, 152-167, 180-195, 201-214, 216-237, 240-246, 251-265, 275-281, 289-294, 301-314, 320-333, 342-349, 351-361, 367-389, 402-408, 426-435, 459-469, 9-27, 31-92, 94-134, 147-199, 202-268, 271-291, 303-333, 336-465, 480-498, and 72-139 of SEQ ID NO 377; amino acids 23-34, 41-52, 74-86, 92-99, 107-121, 123-130, 154-159, 162-169, 193-227, 229-243, 249-255, 260-269, 17-154, 183-272, and 137-270 of SEQ ID NO 378; amino acids 4-29, 81-88, 106-128, 177-200, 207-214, 221-234, 240-250, 255-277, 279-285, 291-324, 326-347, 349-362, 376-392, 400-412, 415-423, 425-440, 444-449, 453-460, 1-52, 60-99, 102-161, 166-189, 203-294, 312-429, 436-468, 487-512, and 419-508 of SEQ ID NO 379; amino acids 4-11, 42-49, 51-68, 91-97, 111-122, 130-142, 156-178, 186-230, 247-252, 278-297, 303-331, 337-344, 355-360, 383-391, 415-421, 439-444, 452-463, 468-481, 516-524, 537-542, 558-570, 576-582, 590-597, 621-633, 655-661, 667-673, 680-688, 728-734, 764-771, 776-789, 803-810, 825-841, 844-853, 877-891, 893-907, 924-933, 947-960, 966-974, 984-989, 998-1011, 1018-1024, 1028-1034, 1044-1053, 1084-1093, 1104-1110, 1114-1121, 1146-1154, 1166-1173, 1189-1196, 1202-1210, 1212-1218, 1220-1228, 1243-1248, 2-25, 30-82, 95-287, 304-370, 444-491, 507-662, 677-698, 704-746, 763-811, 818-920, 926-970, 989-1127, 1130-1198, 1203-1239, 200-260, 562-610, 815-858, 892-903, 961-1060, and 1065-1073 of SEQ ID NO 380; amino acids 25-41, 50-56, 58-70, 101-111, 118-126, 138-147, 161-168, 242-252, 271-291, 320-329, 336-342, 353-364, 369-375, 383-389, 418-432, 473-484, 499-514, 520-532, 537-545, 548-560, 567-575, 588-606, 612-622, 628-634, 647-658, 666-673, 686-693, 700-706, 714-720, 734-744, 754-759, 786-798, 820-827, 852-859, 864-885, 892-899, 908-915, 921-933, 941-946, 950-957, 1-52, 55-157, 189-250, 269-311, 358-576, 582-774, 783-837, 855-924, 930-961, 75-155, 197-242, 257-412, 457-547, 715-788, and 874-936 of SEQ ID NO 381; amino acids 29-36, 49-55, 92-100, 109-116, 127-135, 140-148, 153-158, 169-176, 179-191, 214-221, 227-237, 240-246, 1-43, 55-73, 108-155, 164-249, and 20-87 of SEQ ID NO 382; amino acids 5-19, 30-41, 44-49, 64-70, 72-80, 82-88, 95-100, 115-120, 141-163, 1-39, 57-119, 131-166, and 15-83 of SEQ ID NO 383; amino acids 18-53, 64-75, 91-98, 103-109, 112-119, 154-167, 173-181, 200-208, 226-241, 261-268, 283-289, 294-309, 344-371, 374-382, 388-398, 416-423, 425-439, 442-453, 456-472, 491-497, 502-513, 515-524, 527-542, 547-562, 599-608, 610-620, 623-632, 636-656, 666-675, 683-692, 697-703, 709-716, 747-769, 778-785, 792-805, 829-836, 863-870, 877-905, 913-922, 937-950, 952-985, 991-999, 1-110, 114-160, 169-189, 216-238, 244-364, 378-409, 422-446, 453-475, 487-570, 590-640, 643-713, 722-809, 816-952, 969-1017, 155-173, 239-280, 501-575, 689-727, 766-789, and 826-880 of SEQ ID NO 384; amino acids 29-35, 40-64, 66-75, 115-122, 141-173, 179-187, 199-206, 209-215, 234-240, 244-251, 259-272, 297-303, 319-325, 332-348, 358-368, 372-382, 388-397, 399-405, 431-439, 446-454, 43-130, 136-211, 242-297, 314-333, 338-387, 396-416, 422-459, 19-144, 219-359, and 438-452 of SEQ ID NO 385; amino acids 4-23, 30-35, 77-84, 92-97, 105-113, 115-120, 131-137, 140-151, 200-211, 226-239, 241-247, 255-261, 271-278, 304-309, 395-400, 429-435, 443-453, 478-493, 521-530, 535-553, 563-568, 571-581, 623-628, 660-667, 693-700, 1-28, 74-140, 151-185, 194-218, 225-298, 300-355, 358-443, 445-463, 468-553, 567-595, 597-621, 631-676, 681-699, 16-72, 526-619, and 625-694 of SEQ ID NO 386; amino acids 4-18, 26-42, 58-79, 83-89, 99-108, 110-118, 125-140, 143-156, 168-175, 177-189, 211-227, 262-273, 281-291, 356-363, 383-402, 464-472, 1-49, 59-247, 251-321, 338-404, 410-430, 438-493, and 244-462 of SEQ ID NO 387; amino acids 6-28, 57-65, 72-81, 87-99, 1-43, 46-68, 83-104, and 13-105 of SEQ ID NO 388; amino acids 4-12, 32-55, 67-81, 92-100, 119-126, 143-151, 153-163, 182-188, 201-210, 238-244, 250-256, 278-283, 290-296, 303-308, 312-317, 345-354, 356-367, 378-388, 423-434, 442-449, 458-465, 476-488, 494-501, 510-520, 530-538, 551-563, 570-577, 582-601, 628-635, 700-714, 719-725, 744-752, 761-769, 778-786, 790-796, 821-839, 851-867, 872-878, 920-945, 957-975, 1022-1031, 1038-1047, 1084-1090, 1-91, 102-123, 130-170, 173-290, 307-327, 334-354, 359-396, 416-484, 507-563, 567-590, 600-618, 623-648, 661-686, 692-813, 822-887, 905-984, 994-1076, 1079-1093, 219-278, 280-417, 599-696, and 750-759 of SEQ ID NO 389; amino acids 6-39, 46-61, 67-72, 75-93, 107-116, 129-164, 169-176, 181-189, 226-243, 245-255, 267-274, 277-305, 319-326, 342-363, 375-385, 390-404, 419-428, 439-446, 448-465, 478-488, 507-516, 524-530, 546-555, 1-33, 35-63, 71-209, 217-237, 246-260, 283-313, 317-397, 399-431, 445-476, 479-558, and 151-220 of SEQ ID NO 390; amino acids 5-14, 25-50, 84-91, 99-111, 119-125, 129-144, 188-197, 200-208, 228-234, 243-250, 262-269, 275-282, 294-299, 9-175, 183-302, 104-209, and 229-292 of SEQ ID NO 391; amino acids 8-27, 29-42, 45-62, 1-71, and 8-61 of SEQ ID NO 392; amino acids 13-39, 41-47, 56-75, 78-87, 100-107, 121-127, 146-157, 164-171, 173-183, 201-207, 210-216, 221-231, 244-252, 255-263, 281-289, 291-309, 348-374, 390-401, 424-433, 435-445, 458-474, 509-530, 534-545, 548-565, 582-591, 597-602, 605-620, 622-628, 663-672, 686-691, 699-711, 728-742, 745-758, 773-786, 3-118, 120-171, 183-290, 293-313, 316-343, 345-367, 373-555, 561-651, 655-730, 737-773, 261-330, 337-365, and 587-709 of SEQ ID NO 393; amino acids 4-25, 41-54, 92-98, 104-111, 122-131, 144-151, 154-160, 200-207, 215-233, 243-253, 259-270, 278-297, 299-310, 328-337, 345-352, 373-389, 398-405, 419-425, 438-447, 472-479, 483-489, 492-501, 505-519, 531-546, 550-555, 568-574, 581-589, 595-600, 622-631, 683-689, 714-725, 733-738, 747-759, 761-766, 772-779, 795-801, 814-821, 856-868, 899-907, 923-929, 931-937, 1-30, 37-57, 64-86, 93-191, 193-217, 231-277, 296-361, 365-394, 398-529, 534-735, 742-785, 788-912, 506-517, and 532-590 of SEQ ID NO 394; amino acids 4-10, 16-25, 31-59, 66-75, 90-99, 102-107, 136-149, 151-159, 185-202, 204-215, 224-237, 240-248, 254-262, 272-278, 310-316, 337-349, 390-396, 400-409, 420-429, 478-484, 502-517, 533-539, 570-584, 614-621, 625-634, 645-654, 662-672, 677-686, 719-733, 747-753, 762-772, 782-792, 802-811, 820-826, 832-841, 856-862, 912-918, 931-937, 964-970, 989-994, 1006-1011, 1017-1023, 1036-1043, 1053-1064, 1071-1077, 1082-1090, 1103-1109, 1128-1135, 1137-1143, 1156-1165, 1169-1174, 1197-1204, 1213-1222, 1255-1273, 1305-1311, 1315-1322, 1340-1346, 1352-1359, 1386-1393, 1403-1412, 1441-1447, 1459-1468, 1470-1479, 1493-1500, 1511-1520, 1525-1537, 1544-1557, 1564-1569, 1580-1585, 1591-1596, 1627-1633, 1642-1656, 1690-1697, 1707-1713, 1715-1721, 1751-1761, 1773-1781, 1791-1796, 1804-1810, 1846-1851, 1860-1870, 1876-1882, 1910-1917, 1947-1953, 1962-1970, 2008-2019, 2026-2036, 2043-2051, 2085-2090, 2105-2115, 2132-2142, 1-30, 32-88, 143-330, 337-359, 379-434, 480-583, 604-715, 719-736, 744-761, 768-800, 805-850, 874-889, 898-948, 961-1053, 1058-1110, 1135-1150, 1157-1183, 1189-1230, 1235-1255, 1259-1277, 1308-1377, 1383-1422, 1428-1450, 1453-1472, 1474-1501, 1507-1591, 1596-1660, 1669-1703, 1709-1767, 1788-1848, 1861-1876, 1922-1941, 1944-1979, 1998-2061, 2069-2102, 2115-2136, 60-298, 308-571, 616-842, 971-1120, 1126-1252, 1359-1652, 1688-1980, and 2051-2106 of SEQ ID NO 395; amino acids 17-25, 29-38, 41-60, 97-105, 111-117, 124-159, 172-181, 186-192, 200-207, 212-229, 241-257, 267-298, 305-314, 316-322, 335-341, 345-355, 357-364, 367-375, 377-382, 387-400, 407-413, 417-428, 437-443, 448-454, 456-463, 469-477, 483-489, 495-508, 513-524, 540-551, 585-602, 1-98, 108-194, 205-473, 490-510, 517-557, 559-615, and 16-287 of SEQ ID NO 396; amino acids 10-33, 35-41, 50-55, 60-73, 81-90, 106-114, 121-136, 147-158, 179-191, 212-219, 229-236, 266-275, 285-307, 312-318, 334-345, 351-359, 361-366, 373-390, 398-419, 450-464, 475-483, 495-506, 524-530, 534-546, 555-565, 572-583, 596-603, 623-640, 658-664, 675-685, 690-696, 702-711, 714-723, 742-748, 765-772, 783-790, 811-823, 835-842, 848-854, 874-881, 1-31, 33-74, 85-118, 138-158, 165-184, 204-359, 375-402, 408-478, 491-511, 531-640, 653-745, 756-861, 871-889, 34-89, 124-209, 227-245, 271-338, 402-453, and 496-596 of SEQ ID NO 397; amino acids 19-31, 39-48, 50-61, 70-76, 85-96, 98-106, 114-127, 129-159, 166-184, 195-210, 215-224, 234-240, 247-254, 259-265, 267-284, 286-295, 297-307, 310-318, 320-330, 340-347, 1-32, 34-74, 93-115, 134-190, 192-255, 266-339, 119-185, and 241-349 of SEQ ID NO 398; amino acids 16-31, 45-52, 62-68, 89-149, 154-164, 175-185, 187-193, 195-207, 222-230, 253-279, 287-295, 299-323, 1-62, 85-154, 172-222, 224-248, 252-328, 188-255, and 319-334 of SEQ ID NO 399; amino acids 7-15, 38-65, 67-76, 80-103, 123-139, 146-152, 181-188, 196-206, 223-229, 234-245, 259-267, 285-296, 323-333, 340-358, 387-393, 401-409, 417-427, 431-439, 441-450, 472-477, 483-496, 508-524, 591-598, 602-610, 616-624, 627-641, 655-664, 666-679, 687-694, 696-709, 714-726, 759-766, 768-778, 782-793, 804-810, 1-105, 115-293, 300-342, 344-418, 432-562, 567-598, 613-656, 670-713, 757-803, and 23-98 of SEQ ID NO 400; amino acids 9-18, 35-57, 65-74, 82-87, 92-98, 105-117, 128-136, 147-154, 157-165, 181-187, 189-218, 224-232, 2-174, 176-241, and 26-112 of SEQ ID NO 401; amino acids 4-13, 24-35, 49-56, 71-77, 81-98, 103-109, 134-150, 158-169, 176-186, 188-195, 222-229, 249-262, 273-282, 335-341, 358-366, 375-395, 415-423, 431-448, 468-477, 486-492, 500-517, 526-539, 553-558, 563-571, 573-579, 581-603, 606-641, 649-657, 659-669, 1-40, 46-117, 127-171, 186-201, 203-318, 332-352, 356-390, 411-543, 560-669, 13-84, and 395-470 of SEQ ID NO 402; amino acids 43-56, 95-108, 139-145, 158-178, 186-199, 204-216, 224-231, 234-247, 251-275, 282-290, 303-309, 312-329, 331-341, 349-355, 379-405, 410-416, 429-436, 452-457, 463-474, 476-483, 485-491, 507-531, 546-563, 573-585, 628-635, 663-669, 687-700, 718-725, 731-742, 758-769, 788-795, 800-811, 824-831, 841-852, 859-865, 869-881, 885-891, 896-904, 941-951, 955-972, 1-91, 93-195, 199-284, 324-357, 385-405, 409-499, 506-604, 621-678, 688-749, 753-806, 815-882, 887-927, 933-953, 30-60, 107-144, 235-255, 439-492, 620-673, 767-814, and 864-969 of SEQ ID NO 403; amino acids 6-31, 59-73, 76-87, 98-104, 107-118, 126-145, 156-165, 168-177, 185-193, 206-214, 217-237, 245-252, 256-276, 288-304, 314-331, 333-340, 366-378, 387-406, 409-423, 428-437, 457-463, 480-488, 509-519, 536-542, 550-563, 571-593, 606-612, 6-51, 54-151, 161-194, 203-357, 361-474, 477-497, 501-538, 541-615, and 319-382 of SEQ ID NO 404; amino acids 6-12, 17-31, 33-48, 1-53, and 2-60 of SEQ ID NO 405; amino acids 54-61, 64-86, 91-109, 111-120, 127-133, 135-143, 147-152, 166-176, 179-186, 189-207, 212-220, 226-231, 235-242, 250-267, 271-279, 294-308, 316-336, 347-353, 362-368, 380-389, 391-398, 406-418, 441-463, 471-500, 503-522, 524-560, 562-570, 572-582, 584-590, 634-639, 643-652, 657-663, 666-673, 697-707, 714-721, 727-734, 743-751, 758-776, 796-806, 852-867, 870-896, 898-905, 923-945, 948-955, 957-962, 964-969, 982-988, 1000-1006, 1008-1014, 1030-1042, 1056-1068, 1075-1086, 2-97, 111-196, 209-321, 327-349, 353-367, 377-408, 418-491, 500-664, 691-772, 788-1019, 1024-1049, 1054-1077, 1079-1095, 29-54, 261-267, and 635-691 of SEQ ID NO 406; amino acids 4-16, 18-41, 47-54, 106-113, 120-131, 144-150, 165-171, 192-202, 220-227, 229-239, 245-259, 314-327, 358-365, 377-384, 396-402, 414-430, 436-442, 457-466, 474-480, 498-519, 524-531, 535-541, 564-569, 581-597, 622-628, 653-676, 681-686, 719-727, 1-139, 145-180, 186-261, 271-291, 308-328, 332-365, 372-394, 400-440, 453-530, 533-585, 588-631, 639-687, 695-746, 118-193, 209-355, and 505-657 of SEQ ID NO 407; amino acids 6-27, 50-56, 62-72, 80-86, 98-111, 118-127, 138-168, 176-184, 189-201, 205-245, 256-263, 1-44, 46-115, 132-192, 222-242, 246-264, 161-212, and 218-247 of SEQ ID NO 408; amino acids 6-28, 32-41, 46-66, 74-84, 92-108, 110-117, 137-146, 152-170, 173-200, 226-264, 266-275, 284-301, 308-313, 316-335, 355-364, 374-388, 394-404, 406-416, 424-431, 437-452, 456-477, 1-49, 51-166, 170-203, 208-368, 382-486, 489-507, 5-82, 101-118, and 260-376 of SEQ ID NO 409; amino acids 4-13, 16-26, 28-34, 39-45, 47-63, 68-121, 130-145, 150-162, 165-171, 176-203, 215-240, 242-249, 251-261, 282-290, 293-309, 316-322, 334-352, 360-367, 397-410, 412-422, 430-439, 1-67, 73-274, 288-429, 434-465, 119-189, 200-246, and 399-436 of SEQ ID NO 410; amino acids 4-12, 15-22, 25-34, 36-47, 54-79, 92-99, 106-114, 129-136, 150-160, 168-184, 186-215, 222-229, 239-249, 286-293, 299-314, 322-327, 333-358, 371-378, 387-406, 413-422, 435-443, 448-455, 461-471, 474-480, 489-495, 1-42, 57-82, 87-123, 127-498, and 30-110 of SEQ ID NO 411; amino acids 4-29, 42-68, 70-79, 1-52, 57-80, and 15-86 of SEQ ID NO 412; amino acids 8-51, 78-86, 94-99, 107-113, 140-148, 156-162, 173-181, 189-197, 213-229, 264-270, 274-281, 283-293, 308-321, 347-360, 399-411, 425-436, 442-449, 466-482, 486-498, 516-521, 527-534, 557-565, 586-594, 604-617, 622-630, 652-674, 720-731, 742-754, 773-783, 1-129, 131-247, 263-335, 343-364, 370-639, 652-697, 712-779, 187-241, 319-394, 411-485, and 657-679 of SEQ ID NO 413; amino acids 7-14, 36-46, 48-57, 74-81, 85-108, 113-131, 141-154, 168-179, 16-67, 69-91, 96-134, 137-177, and 48-105 of SEQ ID NO 414; amino acids 4-20, 28-33, 39-55, 57-65, 68-82, 84-92, 117-123, 1-85, 92-148, and 15-142 of SEQ ID NO 415; amino acids 4-9, 17-23, 37-53, 71-89, 104-116, 123-128, 133-138, 145-170, 173-205, 213-232, 234-252, 260-268, 275-280, 287-311, 316-345, 357-364, 1-18, 37-57, 68-278, 306-400, 7-100, and 152-243 of SEQ ID NO 416; amino acids 5-19, 38-45, 77-83, 89-99, 108-119, 125-132, 144-153, 161-171, 180-191, 221-227, 233-243, 274-286, 293-299, 1-27, 44-147, 159-255, 262-280, 288-302, 22-73, and 224-290 of SEQ ID NO 417; amino acids 8-15, 17-39, 48-55, 57-77, 87-95, 99-109, 119-132, 146-152, 171-176, 196-203, 220-229, 231-245, 253-259, 273-285, 293-300, 318-324, 331-344, 367-374, 395-401, 409-414, 434-471, 483-490, 509-517, 519-534, 537-544, 554-574, 584-590, 599-609, 615-625, 632-639, 665-672, 676-686, 688-697, 702-708, 714-720, 730-742, 744-752, 780-786, 790-800, 812-836, 2-17, 28-146, 152-170, 198-214, 235-270, 279-326, 333-368, 381-407, 435-608, 624-650, 656-673, 711-779, 782-799, 809-872, 157-185, and 341-483 of SEQ ID NO 418; amino acids 4-57, 60-67, 80-96, 98-118, 5-114, and 38-112 of SEQ ID NO 419; amino acids 11-34, 43-51, 67-108, 116-138, 151-165, 9-30, 40-168, and 13-78 of SEQ ID NO 420; amino acids 18-24, 40-47, 51-62, 67-74, 87-94, 102-109, 112-121, 141-147, 152-164, 175-198, 200-224, 229-235, 245-260, 262-293, 310-323, 326-349, 390-414, 423-431, 440-447, 456-462, 466-476, 481-493, 497-504, 512-538, 545-550, 560-573, 584-591, 596-602, 607-613, 7-67, 71-131, 134-231, 233-260, 276-340, 342-385, 388-443, 447-475, 509-616, and 504-552 of SEQ ID NO 421; amino acids 11-17, 38-49, 52-58, 67-79, 98-104, 7-106, and 16-107 of SEQ ID NO 422; amino acids 5-17, 32-46, 54-60, 89-102, 112-127, 152-161, 169-178, 186-193, 228-240, 247-256, 259-266, 274-296, 3-38, 55-69, 72-135, 165-301, 22-96, 124-131, 143-172, and 209-275 of SEQ ID NO 423; amino acids 17-26, 32-44, 1-43, and 28-49 of SEQ ID NO 424; amino acids 11-17, 26-32, 72-77, 162-168, 204-211, 218-224, 234-243, 270-276, 287-301, 314-333, 339-345, 360-375, 392-398, 403-409, 419-434, 438-444, 454-468, 473-479, 489-503, 508-514, 524-539, 543-549, 559-574, 578-584, 607-616, 618-628, 664-669, 710-715, 718-730, 734-740, 747-763, 766-772, 774-785, 787-796, 73-125, 133-152, 163-246, 264-330, 337-376, 594-635, 660-680, 693-711, 715-816, 6-428, and 493-608 of SEQ ID NO 425; amino acids 14-29, 32-58, 63-76, 78-86, 89-100, 102-110, 131-140, 148-154, 188-201, 210-219, 230-243, 245-254, 262-281, 298-307, 316-324, 340-352, 373-396, 407-414, 440-453, 456-477, 480-487, 495-508, 515-529, 537-544, 552-560, 564-572, 587-592, 605-619, 625-632, 638-644, 660-674, 684-690, 697-719, 732-738, 1-58, 67-95, 123-168, 176-240, 242-284, 287-317, 325-390, 398-418, 423-499, 510-582, 598-631, 635-683, 692-734, 127-190, 537-604, and 697-727 of SEQ ID NO 426; amino acids 13-27, 38-44, 48-55, 57-69, 72-81, 97-108, 126-141, 152-160, 165-177, 180-186, 197-241, 289-296, 309-328, 334-339, 341-353, 1-106, 125-251, 257-306, 310-356, 42-51, and 97-267 of SEQ ID NO 427; amino acids 4-10, 12-21, 29-35, 44-56, 59-67, 74-86, 91-98, 103-114, 1-124, and 9-86 of SEQ ID NO 428.

[0060] In one embodiment the antigen further consists of
[0061] a) 1 to 50 additional amino acid residue(s), preferably 1 to 40, more preferably 1 to 30, even more preferably at most 1 to 25, still more preferably at most 1 to 10, most preferably 1, 2, 3, 4 or 5 additional amino acid residue(s); and/or
[0062] b) at least one amino acid residue heterologous to the core amino acid sequence.

[0063] Said additional amino acid residue(s) are further defined above.

[0064] In another embodiment said amino acid residue(s) is/are flanking the core amino acid sequence N-terminally, C-terminally, or N- and C-terminally.

[0065] In an embodiment of the invention the antigen comprises at least 2, at least 3, at least 4, at least 5 or at least 6 core amino acid sequences as defined above.

[0066] The problem underlying the present invention is solved in another aspect by a process for producing an antigen, or an active fragment or an active variant thereof, as defined in the present invention, comprising expressing the nucleic acid molecule as defined above.

[0067] The present invention further relates to a process for producing a cell which expresses an antigen, or an active fragment or an active variant thereof, as defined above, comprising transforming or transfecting a suitable host cell with the vector as defined above.

[0068] In an embodiment, the antigen, or the active fragment or the active variant thereof, is isolated from Mcat.

[0069] The problem underlying the present invention is solved in another aspect by a pharmaceutical composition, preferably a vaccine, comprising an antigen, or an active fragment or an active variant thereof, as defined above, or a nucleic acid molecule as defined above, or a vector as defined above.

[0070] Another aspect of the present invention provides a pharmaceutical composition, preferably a vaccine, comprising an antigen, or an active fragment or an active variant thereof, as defined above, or a nucleic acid molecule as defined above, or a vector as defined above, for the treatment or prevention of an infection with Mcat.

[0071] In a preferred embodiment the pharmaceutical composition of the present invention further comprises an immunostimulatory substance, preferably polycationic polymers, especially polycationic peptides, immuno stimulatory oligo-deoxynucleotides (ODNs), especially Oligo(dIdC)₁₃ (SEQ ID NO 857), peptides containing at least two LysLeuLys motifs, especially KLKLLLLLKLK (SEQ ID NO 858), neuroactive compounds, especially human growth hormone, alum, Freund's complete or incomplete adjuvants, or combinations thereof.

[0072] In a more preferred embodiment of the pharmaceutical composition of the present invention the immunostimulatory substance is a combination of either a polycationic polymer and immunostimulatory deoxynucleotides, or of a peptide containing at least two LysLeuLys motifs and immunostimulatory deoxynucleotides, preferably a combination of KLKLLLLLKLK (SEQ ID NO 858) and Oligo(dIdC)₁₃ (SEQ ID NO 857).

[0073] In a still more preferred embodiment of the pharmaceutical composition of the present invention the polycationic polymer is a polycationic peptide, especially polyarginine.

[0074] Still another aspect of the present invention provides an antigen, or an active fragment or an active variant thereof, as defined above, or a nucleic acid molecule as defined above, or a vector as defined above for the treatment or prevention of an infection with Mcat.

[0075] Another preferred embodiment of the invention relates to the use of an antigen, an active fragment or an active variant thereof as defined above, or a nucleic acid molecule as defined above, or a vector as defined above for the preparation of a pharmaceutical composition, especially for the preparation of a vaccine, for treating or preventing infections with Mcat.

[0076] The problem underlying the present invention is solved in a further aspect by an antibody, or at least an effective part thereof, which binds to at least a selective part of an antigen or a fragment thereof, preferably an active fragment thereof, or a variant thereof, preferably an active variant thereof, as defined above.

[0077] In a preferred embodiment the antibody is a monoclonal antibody.

[0078] In another preferred embodiment said effective part comprises a Fab fragment, a F(ab) fragment, a F(ab) N fragment, a F (ab)₂ fragment or a Fᵥ fragment.

[0079] In still another embodiment of the invention the antibody is a chimeric antibody.

[0080] In yet another embodiment the antibody is a humanized antibody.

[0081] In a further embodiment the antibody is an IgA or IgG antibody.

[0082] Another aspect of the invention relates to a hybridoma cell line, which produces an antibody as defined above.

[0083] The problem underlying the present invention is furthermore solved by a method for producing an antibody as defined above, characterized by the following steps:
[0084] a) initiating an immune response in a non-human animal by administering an antigen, or an active fragment or an active variant thereof, as defined above, to said animal,
[0085] b) removing an antibody containing body fluid from said animal, and
[0086] c) producing the antibody by subjecting said antibody containing body fluid to further purification steps.

[0087] The invention further relates to a method for producing an antibody as defined above, characterized by the following steps:
[0088] a) initiating an immune response in a non-human animal by administering an antigen or an active fragment or an active variant thereof, as defined above, to said animal,
[0089] b) removing the spleen or spleen cells from said animal,
[0090] c) producing hybridoma cells of said spleen or spleen cells,
[0091] d) selecting and cloning hybridoma cells specific for said antigen or for said active fragment or for said active variant thereof,
[0092] e) producing the antibody by cultivation of said cloned hybridoma cells, and
[0093] f) optionally conducting further purification steps.

[0094] Another aspect of the present invention is related to a pharmaceutical composition comprising an antibody as specified above.

[0095] Still another aspect relates to an antibody as defined above or a pharmaceutical composition comprising an antibody as defined above for the treatment or prevention of an infection with Mcat.

[0096] The problem underlying the present invention is solved in another aspect by the use of an antibody as defined above for the preparation of a pharmaceutical composition for treating or preventing infections with Mcat.

[0097] According to another aspect the present invention provides an antagonist, which binds or is capable of binding to an antigen, or an active fragment or active variant thereof as disclosed in the present invention. According to a still further aspect the antagonist according to the present invention is an antagonist which is capable of reducing or inhibiting the interaction activity of an antigen, or an active fragment thereof or an active variant thereof, according to the present invention to its interaction partner. Such interaction partner is, in a preferred embodiment, an antibody or a receptor, preferably a physiological receptor, of said antigen, or an active fragment thereof or an active variant thereof.

[0098] According to another aspect the present invention provides a method for identifying an antagonist capable of binding to an antigen or an active fragment or an active variant thereof, as defined above, comprising:
[0099] a) contacting an isolated or immobilized antigen or an active fragment or an active variant thereof, as defined above, with a candidate antagonist under conditions to permit binding of said candidate antagonist to said antigen, or an active fragment or active variant thereof, in the presence of a component capable of providing a detectable signal in response to the binding of the candidate antagonist to said antigen, or an active fragment or an active variant thereof; and
[0100] b) detecting the presence or absence of a signal generated in response to the binding of the antagonist to said antigen, or an active fragment or active variant thereof.

[0101] The problem underlying the present invention is further solved by a method for identifying an antagonist capable of reducing or inhibiting the interaction activity of an antigen or an active fragment or an active variant thereof, as defined above, to its interaction partner comprising:
[0102] a) providing an antigen, or an active fragment or active variant thereof, as defined above,
[0103] b) providing an interaction partner to said antigen, or said active fragment or active variant thereof, especially an antibody as defined above,
[0104] c) allowing interaction of said antigen or said active fragment or active variant thereof, to said interaction partner to form an interaction complex,
[0105] d) providing a candidate antagonist,
[0106] e) allowing a competition reaction to occur between the candidate antagonist and the interaction complex,
[0107] f) determining whether the candidate antagonist inhibits or reduces the interaction activities of the antigen, or the active fragment or the active variant thereof, with the interaction partner.

[0108] The present invention further relates to the use of any of the antigens, or an active fragment or an active variant thereof, as defined above, for the isolation and/or purification and/or identification of an interaction partner of said antigen, or said active fragment or active variant thereof.

[0109] Another aspect of the present invention relates to a method for diagnosing an infection with an Mcat organism comprising the steps of
[0110] a) contacting a sample obtained from a subject with an antigen, or an active fragment or active variant thereof, as defined above; and
[0111] b) detecting the presence of an antibody against said Mcat organism in the sample.

[0112] According to an embodiment of said method, the presence of one or more antibodies against said Mcat organism is indicative for the Mcat infection.

[0113] In another embodiment of said method the antibody is an IgA or IgG antibody.

[0114] In yet another aspect the present invention provides a method for diagnosing an infection with an Mcat organism comprising the steps of:
[0115] a) contacting a sample obtained from a subject with the antibody as defined above; and
[0116] b) detecting the presence of an antigen of said Mcat organism in the sample.

[0117] In an embodiment of said method the antigen of said Mcat organism is an antigen, or an active fragment or an active variant thereof, as defined above.

[0118] According to an embodiment of said method, the presence of one or more antigens of said Mcat organism is indicative for the Mcat infection.

[0119] In another embodiment of said method the antibody is an IgA or IgG antibody.

[0120] Still another aspect relates to a method for diagnosing an infection with an Mcat organism comprising the steps of:
[0121] a) contacting a sample obtained from a subject with a primer or a probe specific for a nucleic acid molecule, or a fragment thereof, as defined above; and
[0122] b) detecting the presence of such nucleic acid molecule or fragment thereof in the sample.

[0123] According to an embodiment of said method, the presence of one or more of said nucleic acid molecules or fragments thereof is indicative for the Mcat infection.

[0124] The present invention also provides a process for in vitro diagnosing a disease related to expression of an antigen or a fragment thereof according to the present invention comprising determining the presence of a nucleic acid sequence encoding said antigen or fragment thereof according to the present invention or determining the presence of the antigen or fragment thereof according to the present invention.

[0125] In an embodiment of any of the above described methods for diagnosing an infection with an Mcat organism, the Mcat organism is a pathogenic Mcat organism.

[0126] Moreover, the present invention provides the use of an antigen, or a fragment or a variant thereof, as defined in the present invention for the generation of a peptide binding to said antigen, or a fragment thereof or a variant thereof, wherein the peptide is an anticaline.

[0127] Moreover, the present invention provides the use of an antigen, or an active fragment or active variant thereof, as defined above, for the preparation of a functional nucleic acid, wherein the functional nucleic acid is selected from the group consisting of aptamers and spiegelmers.

[0128] In another aspect, the present invention provides the use of a nucleic acid molecule as defined above for the preparation of a functional ribonucleic acid, wherein the functional ribonucleic acid is selected from the group consisting of ribozymes, antisense nucleic acids and siRNA.

[0129] The problem underlying the present invention is further solved by a method for the treatment of an Mcat infection in an animal or human preferably in need thereof, comprising the step of administering to said animal or human a therapeutically effective amount of an antigen, or an active fragment or an active variant thereof, or a nucleic acid molecule, or a vector, or an antibody or a pharmaceutical composition as defined in any of the preceding aspects.

[0130] The problem underlying the present invention is solved in another aspect by a method for immunizing an animal or human against infection with an Mcat organism, comprising the step of administering to said animal or human an effective amount of the antigen, or an active fragment or active variant thereof, as defined above, or the nucleic acid molecule as defined above, or a vector as defined above, or an antibody as defined above, or a pharmaceutical composition as defined above, wherein the effective amount is suitable to elicit an immune response in said animal or human.

[0131] The problem underlying the present invention is solved in yet another aspect by a method for stimulating an immune response in an animal or human against an Mcat organism, comprising the step of administering to said animal or human an effective amount of the antigen, or an active fragment or an active variant thereof, as defined above, or of the nucleic acid molecule as defined above or of a vector as defined above, or an antibody as defined above, or a pharmaceutical composition as defined above, wherein the effective amount is suitable to stimulate the immune response in said animal or human.

[0132] It is within the present invention that the various methods and uses, respectively, where an antigen as defined in the present invention is used, can also be performed or practiced using a fragment of such antigen, preferably an active fragment thereof, or a variant of such antigen, preferably an active variant thereof, each as preferably described herein. It is also within the present invention that the various kinds of compounds disclosed herein as interacting with or targeting the antigen according to the present invention, can additionally or alternatively interact with or target the active fragment or active variant of said antigen.

[0133] It is also within the present invention that each and any method in the practice of which an antibody is used, can, in principle, also be practiced when instead of the antibody the anticalines or the functional nucleic acids as defined herein are used, whereby it is preferred that such functional nucleic acid is selected from the group consisting of aptamers and spiegelmers. This applies equally to the various uses of the present application.

[0134] In a preferred embodiment a fragment of an antigen as disclosed herein is a part of such antigen which exhibits at least one feature of such antigen. Preferably such feature is a feature selected from the group consisting of suitability for the treatment of infections, immunization of an animal including human, and/or stimulation of an immune response in an animal including human.

[0135] It is also within the present invention that any disclosure made herein in relation to Mcat.

[0136] The terms “polypeptide”, “peptide”, “protein” or “antigen” are used interchangeably throughout the present specification and refer in a comprehensive manner to the antigen according to the present invention, including each and any variant, fragment, analogue or derivative thereof, particularly as described herein. Insofar, whenever the term polypeptide, peptide, protein or antigen is used herein, and if not explicitly stated otherwise, the respective disclosure is also made for or in relation to any antigen according to the present invention, including each and any variant, fragment, analogue or derivative thereof, particularly as described herein. Also it is to be understood that any use or aspect described in connection with any of the above mentioned compounds covered by the term polypeptide, peptide, protein or antigen according to the present invention shall be applicable also to each and any other of the above mentioned compounds covered by the term polypeptide, peptide, protein or antigen according to the present invention.

[0137] The present invention advantageously provides an efficient, relevant and comprehensive set of isolated nucleic acid molecules and antigens encoded by them, including the active fragments and the active variants thereof, using an antibody preparation from multiple human plasma pools and surface expression libraries derived from the genome of Mcat. Thus, the present invention fulfils a widely felt demand for Mcat antigens, vaccines, diagnostics and products useful in procedures for preparing antibodies and for identifying compounds effective against infections caused by pathogenic Mcat species.

[0138] An effective vaccine should be composed of proteins or polypeptides, which are expressed by all strains and are able to induce high affinity, abundant antibodies against cell surface components of said pathogenic Mcat. The antibodies should be IgG1 and/or IgG3 for opsonisation, any IgG subtype, and/or IgA for neutralisation of adherence and toxin action.

[0139] Mcat infects the host via the mucosal epithelia of the respiratory tract and mucosal immunity is therefore believed to be important to control infection. IgA is the primary immunoglobulin (Ig) isotype induced at mucosal sites and is thought to mediate defense functions at these sites.

[0140] A chemically defined vaccine must be definitely superior compared to a whole cell vaccine (attenuated or killed), since components of said pathogenic Mcat, which cross-react with human tissues or inhibit opsonisation can be eliminated, and the individual polypeptides inducing protective antibodies and/or a protective immune response can be selected.

[0141] In a preferred embodiment of the present invention, the nucleic acid molecules exhibit 70% identity over their entire length to a nucleotide sequence set forth in SEQ ID NOs 860 to 886 or 1 to 214. More preferred are nucleic acids that comprise a region that is at least 80% or at least 85% identical over their entire length to a nucleic acid molecule set forth in SEQ ID NOs 860 to 886 or 1 to 214. In this regard, nucleic acid molecules, which are at least 90%, 91%, 92%, 93%, 94%, 95%, or 96% identical over their entire length to the same are particularly preferred. Furthermore, those with at least 97% are highly preferred, those with at least 98% and at least 99% are particularly highly preferred, with at least 99% or 99.5% being the more preferred, with 100% identity being especially preferred. Moreover, preferred embodiments in this respect are nucleic acids, which encode antigens or fragments thereof (polypeptides), which retain substantially the same biological function or activity as the mature polypeptide set forth in the SEQ ID NOs 887 to 913 or 215 to 428. It is also within the present invention that the nucleic acid molecules according to the present invention are coding for a protein which is preferably an antigen. Still further it is within the present invention, that the molecules defined by SEQ ID NOs 887 to 913 or 215 to 428 are proteins, which are preferably antigens.

[0142] Identity, as known in the art and used herein, is the relationship between two or more polypeptide sequences or two or more polynucleotide sequences, as determined by comparing the sequences. In the art, identity also means the degree of sequence relatedness between polypeptide or polynucleotide sequences, as the case may be, as determined by the match between strings of such sequences. Identity can be readily calculated. While a number of methods exist to measure identity between two polynucleotide or two polypeptide sequences, the term is well known to skilled artisans (e.g. Sequence Analysis in Molecular Biology, von Heinje, G., Academic Press, 1987). Preferred methods to determine identity are designed to give the largest match between the sequences tested. Methods to determine identity are codified in computer programs. Preferred computer program methods to determine identity between two sequences include, but are not limited to, GCG program package (Devereux, J. et al., 1984), BLASTP, BLASTN, and FASTA (Altschul, S. et al., 1990).

[0143] As a second alternative to the nucleic acid molecules described herein by reference to SEQ ID NOs 860 to 886 or 1 to 214, the description of which is also referred to herein as first alternative, the nucleic acid molecules according to the present invention can also be nucleic acid molecules, which are at least essentially complementary to the nucleic acids described in accordance with the first alternative herein. It will be acknowledged by the ones skilled in the art that an individual nucleic acid molecule is at least essentially complementary to another individual nucleic acid molecule. As used herein complementary means that a nucleic acid strand is base pairing via Watson-Crick base pairing with a second nucleic acid strand. Essentially complementary as used herein means that the base pairing is not occurring for all of the bases of the respective strands but leaves a certain number or percentage of the bases unpaired or wrongly paired. The percentage of correctly pairing bases is preferably at least 70%, more preferably 80%, even more preferably 90% and most preferably any percentage higher than 90%. Such higher percentage includes 91%, 92%, 93%, 94%, 95%, 96%, 97%, 98%, 99% and 100%, whereby such definition is applicable to each aspect of the present application where this kind of terminology is used. It is to be noted that a percentage of 70% matching bases is considered as homology and the hybridisation having this extent of matching base pairs is considered as stringent. Hybridisation conditions for this kind of stringent hybridisation may be taken from Current Protocols in Molecular Biology (John Wiley and Sons, Inc., 1987). More particularly, the hybridisation conditions can be as follows:
[0144] Hybridisation performed e.g. in 5×SSPE, 5×Denhardt's reagent, 0.1% SDS, 100 g/mL sheared DNA at 68° C.

[0145] Moderate stringency wash in 0.2×SSC, 0.1% SDS at 42° C.

[0146] High stringency wash in 0.1×SSC, 0.1% SDS at 68° C.

[0147] Genomic DNA with a GC content of 50% has an approximate T_{M} of 96° C. For 1% mismatch, the T_{M} is reduced by approximately 1° C.

[0148] In addition, any of the further hybridisation conditions described herein are in principle applicable as well.

[0149] Of course, all nucleic acid sequence molecules which encode the same polypeptide molecule as those identified by the present invention are encompassed by any disclosure of a given coding sequence, since the degeneracy of the genetic code is directly applicable to unambiguously determine all possible nucleic acid molecules which encode a given polypeptide molecule, even if the number of such degenerated nucleic acid molecules may be high. This is also applicable for active fragments or active variants of a given antigen, as long as the fragments or variants encode an antigen being suitable to be used such that the same effect can be obtained as if the full-length antigen was used. Preferably, such antigens or active fragments or active variants thereof may be used in a vaccination application, e.g. as an active or passive vaccine.

[0150] As a third alternative, the nucleic acid molecule according to the present invention can also be a nucleic acid which comprises a stretch of at least 15 bases of the nucleic acid molecule according to the first or second alternative of the nucleic acid molecules according to the present invention as outlined above. Preferably, the bases form a contiguous stretch of bases. However, it is also within the scope of the present invention that the stretch consists of two or more moieties, which are separated by a number of bases.

[0151] The nucleic acid molecules according to the present invention may preferably consist of at least 20, even more preferred at least 30, especially at least 50 contiguous bases from the sequences disclosed herein. The suitable length may easily be optimised due to the intended field of use (e.g. as (PCR) primers, probes, capture molecules (e.g. on a (DNA) chip), etc.). Preferred nucleic acid molecules contain at least a contiguous 15 base portion of one or more of the immunogenic amino acid sequences listed in Table 4. Specifically preferred are nucleic acids containing a contiguous portion of a DNA sequence of any sequence contained in the sequence protocol of the present application which shows 1 or more, preferably more than 2, especially more than 5, non-identical nucleic acid residues compared to the genome sequences of Mcat RH4 (determined by Intercell AG (Vienna, Austria)). Specifically preferred non-identical nucleic acid residues are residues which lead to a non-identical amino acid residue. Preferably, the nucleic acid sequences encode polypeptides, proteins, or antigens having at least 1, preferably at least 2, preferably at least 3 different amino acid residues compared to the published or listed Mcat counterparts mentioned above. Preferably, these kind of polypeptides, proteins, or antigens still have at least one of the characteristics of the molecules disclosed herein having identical amino acid residues. Also preferred are such isolated polypeptides which are fragments of the proteins or of the antigens disclosed herein, e.g. in the Sequence Listing, having at least 6, 7, or 8 amino acid residues and being encoded by the nucleic acids as described herein.

[0152] The nucleic acid molecule according to the present invention can, as a fourth alternative, also be a nucleic acid molecule which anneals under stringent hybridisation conditions to any of the nucleic acids of the present invention according to the first, second, or third alternative as disclosed herein. Stringent hybridisation conditions are typically those described herein.

[0153] Finally, the nucleic acid molecule according to the present invention can, as a fifth alternative, also be a nucleic acid molecule which, but for the degeneracy of the genetic code, would hybridise to any of the nucleic acid molecules of the present invention according to the first, second, third, and fourth alternative as outlined herein. This kind of nucleic acid molecule refers to the fact that preferably the nucleic acids according to the present invention code for the antigen, or fragments or variants thereof, according to the present invention. This kind of nucleic acid molecule is particularly useful in the detection of a nucleic acid molecule according to the present invention and thus the diagnosis of the respective microorganisms such as Mcat or any pathogenic Mcat species, and any disease or diseased condition where these kinds of microorganisms are involved. Preferably, such microorganism, especially an opportunistic microorganism, is causing such disease directly or indirectly. Preferably, the hybridisation could occur or be performed under stringent conditions as described in connection with the fourth alternative described herein.

[0154] Nucleic acid molecule as used herein generally refers to any ribonucleic acid molecule, such as mRNA or cRNA, or deoxyribonucleic acid molecule, including, for instance, cDNA and genomic DNA obtained by cloning or produced by chemical synthetic techniques or by a combination thereof. The nucleic acid molecule may be unmodified RNA or DNA or modified RNA or DNA. Thus, for instance, nucleic acid molecule as used herein refers to, among others, single- and double-stranded DNA, DNA that is a mixture of single- and double-stranded DNA, and RNA that is a mixture of single- and double-stranded regions, hybrid molecules comprising DNA and RNA that may be single-stranded or, more typically, double-stranded, or triple-stranded, or a mixture of single- and double-stranded regions. In addition, nucleic acid molecule as used herein refers to triple-stranded regions comprising RNA or DNA or both RNA and DNA. The strands in such regions may be from the same molecule or from different molecules. The regions may be derived from one or more of the molecules, but more typically involve only a region of some of the molecules. One of the molecules of a triple-helical region often is an oligonucleotide. Single-stranded DNA may be the coding strand, also known as the sense strand, or it may be the non-coding strand, also referred to as the anti-sense strand. As used herein, the term nucleic acid molecule includes DNAs or RNAs as described above that contain one or more modified bases. Thus, DNAs or RNAs with backbones modified for stability or for other reasons are nucleic acid molecules as that term is intended herein. Moreover, DNAs or RNAs comprising unusual bases, such as inosine, or modified bases, such as tritylated bases, to name just two examples, are nucleic acid molecules as the term is used herein. It will be appreciated that a great variety of modifications can be made to DNA and RNA that serve many useful purposes known to those of skill in the art. The term nucleic acid molecule as it is employed herein embraces such chemically, enzymatically or metabolically modified forms of nucleic acid molecule, as well as the chemical forms of DNA and RNA characteristic of viruses and cells, including simple and complex cells, inter alia. The term nucleic acid molecule also embraces short nucleic acid molecules often referred to as oligonucleotide(s). “Polynucleotide” and “nucleic acid” or “nucleic acid molecule” are often used interchangeably herein.

[0155] Nucleic acid molecules provided in the present invention also encompass numerous unique fragments, both longer and shorter than the nucleic acid molecule sequences set forth in the sequencing listing of the present application, more specifically of the Mcat coding regions, which can be generated by standard cloning methods. To be unique, a fragment must be of sufficient size to distinguish it from other known nucleic acid sequences, most readily determined by comparing any selected Mcat fragment to the nucleotide sequences in biosequence databases such as GenBank. It will be appreciated by the one skilled in the art that what is said herein in any aspect in relation to Mcat applies equally to any other Mcat species, more preferably any pathogenic Mcat species.

[0156] Additionally, modifications can be made to the nucleic acid molecules and polypeptides that are encompassed by the present invention. For example, the nucleic acid also includes sequences that are a result of the degeneration of the genetic code. There are 20 natural amino acids, most of which are specified by more than one codon. Thus, nucleotide substitutions can be made which do not affect the polypeptide encoded by the nucleic acid. Accordingly, any nucleic acid molecule which encodes an antigen or fragments thereof is encompassed by the present invention.

[0157] Furthermore, any of the nucleic acid molecules encoding antigens or fragments thereof provided by the present invention can be functionally linked, using standard techniques such as standard cloning techniques, to any desired regulatory sequences, whether an Mcat regulatory sequence or a heterologous regulatory sequence, heterologous leader sequence, heterologous marker sequence or a heterologous coding sequence to create a fusion protein.

[0158] The present invention further relates to variants of the nucleic acid molecules described herein which encode fragments, analogs and derivatives of the antigens and fragments thereof having a deducted Mcat amino acid sequence set forth in the Sequence Listing. A variant of the nucleic acid molecule may be a naturally occurring variant such as a naturally occurring allelic variant, or it may be a variant that is not known to occur naturally. Such non-naturally occurring variants of the nucleic acid molecule may be made by mutagenesis techniques, including those applied to nucleic acid molecules, cells or organisms.

[0159] Among variants in this regard are variants that differ from the aforementioned nucleic acid molecules by nucleotide substitutions, deletions or additions. The substitutions, deletions or additions may involve one or more nucleotides. The variants may be altered in coding or non-coding regions or both. Alterations in the coding regions may produce conservative or non-conservative amino acid substitutions, deletions or additions. Preferred are nucleic acid molecules encoding a variant, analog, derivative or fragment, or a variant, analogue or derivative of a fragment, which have an Mcat sequence as set forth in the Sequence Listing, in which several, a few, 5 to 10, 1 to 5, 1 to 4, 3, 2, 1 or no amino acid(s) is substituted, deleted or added, in any combination. Especially preferred among these are silent substitutions, additions and deletions, which do not alter the properties and activities of the Mcat polypeptides set forth in the Sequence Listing. Also especially preferred in this regard are conservative substitutions.

[0160] The nucleic acid molecules of the present invention may also be used as a hybridisation probe for, e.g., RNA, cDNA and genomic DNA to isolate full-length cDNAs and genomic clones encoding polypeptides of the present invention and to isolate cDNA and genomic clones of other genes that have a high sequence similarity to the nucleic acid molecules of the present invention. Such probes generally will comprise at least 15 bases. Preferably, such probes will have at least 20, at least 25 or at least 30 bases, and may have at least 50 bases. Particularly preferred probes will have at least 30 bases, and will have 50 bases or less, such as 30, 35, 40, 45, or 50 bases.

[0161] For example, the coding region of a nucleic acid molecule of the present invention may be isolated by screening a relevant library using the known DNA sequence to synthesize an oligonucleotide probe. A labelled oligonucleotide having a sequence complementary to that of a gene of the present invention is then used to screen a library of cDNA, genomic DNA or mRNA to determine to which members of the library the probe hybridizes.

[0162] The nucleic acid molecules and polypeptides of the present invention may be employed as reagents and materials for the development or preparation of pharmaceutical compositions and/or diagnostics for diseases, particularly human disease, as further discussed herein.

[0163] The nucleic acid molecules of the present invention that are oligonucleotides can be used in the processes herein as described, but preferably for PCR, to determine whether or not the Mcat genes identified herein in whole or in part are present and/or transcribed in infected tissue such as skin, synovia or blood. It is recognized that such sequences will also have utility in diagnosis of the stage of infection and type of infection the pathogen has attained. For this and other purposes arrays which are known as such in the art, comprising at least one of the nucleic acids or polypeptides according to the present invention as described herein, may be used.

[0164] The nucleic acid molecules according to the present invention may be used for the detection of nucleic acid molecules and organisms or samples containing these nucleic acids. Preferably such detection is for diagnosis, more preferably for the diagnosis of a disease related or linked to the presence or abundance of Mcat.

[0165] Eukaryotes (herein also “individual(s)”), particularly mammals, and especially humans, infected with Mcat can be identified by detecting any of the nucleic acid molecules according to the present invention detected at the DNA level by a variety of techniques. Preferred nucleic acid molecule candidates for distinguishing Mcat or other pathogenic Mcat from other organisms can be obtained.

[0166] The invention provides a process for diagnosing disease arising from infection with Mcat, comprising determining from a sample isolated or derived from an individual an increased level of expression of a nucleic acid molecule having the sequence of a nucleic acid molecule as disclosed herein and more preferably set forth in the Sequence Listing. Expression of nucleic acid molecules can be measured using any one of the methods well known in the art for the quantification of nucleic acid molecules, such as, for example, PCR, RT-PCR, RNase protection, Northern blotting, other hybridisation methods and the arrays described herein.

[0167] Isolated as used herein means separated “by the hand of man” from its natural state; i.e., that, if it occurs in nature, it has been changed or removed from its original environment, or both. For example, a naturally occurring nucleic acid molecule or a polypeptide naturally present in a living organism in its natural state is not “isolated”, but the same nucleic acid molecule or polypeptide separated from the coexisting materials of its natural state is “isolated”, as the term is employed herein. As part of or following isolation, such nucleic acid molecules can be joined to other nucleic acid molecules, such as DNAs, for mutagenesis, to form fusion genes, and for propagation or expression in a host, for instance. The isolated nucleic acid molecules, alone or joined to other nucleic acid molecules such as vectors, can be introduced into host cells, in culture or in whole organisms. Introduced into host cells in culture or in whole organisms, such DNAs still would be isolated, as the term is used herein, because they would not be in their naturally occurring form or environment. Similarly, the nucleic acid molecules and polypeptides may occur in a composition, such as a media formulations, solutions for introduction of nucleic acid molecules or polypeptides, for example, into cells, compositions or solutions for chemical or enzymatic reactions, for instance, which are not naturally occurring compositions, and, therein remain isolated nucleic acid molecules or polypeptides within the meaning of that term as it is employed herein.

[0168] The nucleic acids can, for example, be isolated from Mcat by methods known to the one skilled in the art. The same applies to the polypeptides according to the present invention.

[0169] Preferably, the nucleic acid molecules of the present invention may be originally formed in vitro, e.g. by chemical synthesis, or in a cell culture and subsequent isolation or purification. In general, the nucleic acids may be obtained by the manipulation of nucleic acids by endonucleases and/or exonucleases and/or polymerases and/or ligases and/or recombinases or other methods known to the skilled practitioner to produce the nucleic acids.

[0170] The nucleic acid sequences as defined by SEQ ID NOs 860 to 886 or 1 to 214 start with the first complete codon comprised by the fragment as inserted into the vector and encodes the first amino acid as defined by SEQ ID NOs 887 to 913 or 215 to 428. However, for the recombinant production additional nucleic acids might be useful or necessary to facilitate the cloning and expression.

[0171] The present invention also relates to vectors, which comprise a nucleic acid molecule or nucleic acid molecules of the present invention. A vector may additionally include nucleic acid sequences that permit it to replicate in the host cell, such as an origin of replication, one or more therapeutic genes and/or selectable marker genes and other genetic elements known in the art such as regulatory elements directing transcription, translation and/or secretion of the encoded protein. The vector may be used to transduce, transform or infect a cell, thereby causing the cell to express nucleic acids and/or proteins other than those native to the cell. The vector optionally includes materials to aid in achieving entry of the nucleic acid into the cell, such as a viral particle, liposome, protein coating or the like.

[0172] The present invention also relates to host cells, which are genetically engineered with vectors of the invention and to the production of the polypeptides according to the present invention by recombinant techniques.

[0173] A great variety of expression vectors can be used to express the polypeptides according to the present invention. Generally, any vector suitable to maintain, propagate or express nucleic acids to express a polypeptide in a host may be used for expression in this regard. In accordance with this aspect of the invention the vector may be, for example, a plasmid vector, a single or double-stranded phage vector, a single or double-stranded RNA or DNA viral vector. Starting plasmids disclosed herein are either commercially available, publicly available, or can be constructed from available plasmids by routine application of well-known, published procedures. Preferred among vectors, in certain respects, are those for expression of nucleic acid molecules and the polypeptides according to the present invention. Nucleic acid constructs in host cells can be used in a conventional manner to produce the gene product encoded by the recombinant sequence. Alternatively, the polypeptides according to the present invention can be synthetically produced by conventional peptide synthesizers. Mature proteins can be expressed in mammalian cells, yeast, bacteria, or other cells under the control of appropriate promoters. Cell-free translation systems can also be employed to produce such proteins using RNAs derived from the DNA construct of the present invention.

[0174] Host cells can be genetically engineered to incorporate nucleic acid molecules and express nucleic acid molecules of the present invention. Representative examples of appropriate hosts include bacterial cells, such as streptococci, staphylococci, E. coli, Streptomyces and Bacillus subtilis cells; fungal cells, such as yeast cells and Aspergillus cells; insect cells such as Drosophila S2 and Spodoptera Sf9 cells; animal cells such as CHO, COS, HeLa, C127, 3T3, BHK, 293, Vero, PER.C6® and Bowes melanoma cells; and plant cells.

[0175] The host cells can be transfected, e.g. by conventional means such as electroporation with at least one expression vector containing a nucleic acid of the invention under the control of a transcriptional regulatory sequence.

[0176] According to another aspect of the present invention, a comprehensive set of novel polypeptides is provided. Such polypeptides, as mentioned previously herein, are antigens as disclosed herein, and the fragments thereof, preferably the active fragments thereof, and the variants thereof, preferably the active variants thereof. Preferably, the polypeptides according to the present invention are antigens and fragments thereof. In a preferred embodiment of the invention, an antigen comprising an amino acid sequence being preferably encoded by any one of the nucleic acids molecules and fragments thereof as described herein, are provided. In another preferred embodiment of the invention a novel set of proteins and antigens and active fragments as well as active variants thereof is provided which comprise amino acid sequences selected from the group consisting of SEQ ID NOs 887 to 913 and 215 to 428.

[0177] The polypeptides according to the present invention, i.e. the antigens, as provided by the present invention preferably include any polypeptide or molecule set forth in the Sequence Listing as well as polypeptides which have at least 70% identity to such polypeptide according to the present invention, preferably at least 80% or 85% identity to such polypeptide according to the present invention, and more preferably at least 90% similarity (more preferably at least 90% identity) to such polypeptide according to the present invention and more preferably as set forth in the Sequence Listing and still more preferably at least 95%, 96%, 97%, 98%, 99% or 99.5% similarity (still more preferably at least 95%, 96%, 97%, 98%, 99%, or 99.5% identity) to such polypeptide according to the present invention and also include portions of such polypeptides with such portion of the polypeptide generally containing at least 4 amino acids and more preferably at least 8, still more preferably at least 30, still more preferably at most 50 amino acids, such as 4, 8, 10, 20, 30, 35, 40, 45 or 50 amino acids. In a preferred embodiment such portions are active fragments of the polypeptides according to the present invention.

[0178] The invention also relates to fragments, analogs, and derivatives of the polypeptides according to the present invention. The terms “fragment”, “derivative” and “analog” when referring to such polypeptide whose amino acid sequence is preferably set forth in the Sequence Listing, means a polypeptide which retains essentially the same or a similar biological activity as such polypeptide. It will be acknowledged by the ones skilled in the art that the meaning of the term “similar biological activity” as used herein preferably depends on the polypeptide under consideration and more specifically its function. The term “biological activity” as used herein is further defined below. More preferably, a similar biological function or activity differs from the function of the non-fragment or the non-derivative in terms of extent of activity, affinity, immunogenicity, stability and/or specificity. In a preferred embodiment the difference is less than 50%, less than 75% or less than 90%.

[0179] In an embodiment the fragment, derivative, variant or analog of a polypeptide according to the present invention is 1) one in which one or more of the amino acid residues are substituted with a conserved or non-conserved amino acid residue (preferably a conserved amino acid residue) and such substituted amino acid residue may or may not be one encoded by the genetic code, or 2) one in which one or more of the amino acid residues includes a substituent group, or 3) one in which the polypeptide according to the present invention or a fragment thereof is fused with another compound, such as a compound to increase the half-life of the polypeptide according to the present invention or a fragment thereof such as, for example, polyethylene glycol, or 4) one in which the additional amino acids are fused to the polypeptide according to the present invention or a fragment thereof, such as a leader or secretory sequence or a sequence which is employed for purification of said polypeptide according to the present invention or fragment thereof or a proprotein sequence. Such fragments, derivatives, variants and analogs are deemed to be within the scope of those skilled in the art from the teachings herein.

[0180] The present invention also relates to proteins and antigens of Mcat species, preferably pathogenic Mcat species. Such homologues may easily be isolated based on the nucleic acid and amino acid sequences disclosed herein.

[0181] There are multiple serotypes, genotypes or clinical strains distinguished to date for each of the pathogens and the typing is based on serotype specific antisera or molecular approaches. The presence of any antigen can accordingly be determined for every serotype, genotype or strain. The contribution of the various serotypes to the different Mcat infections varies in different age groups and especially geographical regions. It is an important aspect that the most valuable protective antigens need to be conserved among various clinical strains.

[0182] Additionally, fusion polypeptides comprising such antigens, variants, analogs, derivatives and fragments thereof, and variants, analogs and derivatives of the fragments are also encompassed by the present invention. Such fusion polypeptides and proteins, as well as nucleic acid molecules encoding them, can readily be made using standard techniques, including standard recombinant techniques for producing and expression of a recombinant polynucleic acid encoding a fusion protein.

[0183] In another embodiment of the invention the peptide as defined above may be modified by a variety of chemical techniques to produce derivatives having essentially the same activity (as defined above for fragments and variants) as the un-modified peptides, and optionally having other desirable properties. For example, carboxylic acid groups of the protein, whether C-terminal or side chain, may be provided in the form of a salt of a pharmaceutically acceptable cation or esterified to form an ester, or converted to an amide. Amino groups of the peptide, whether amino-terminal or side chain, may be in the form of a pharmaceutically-acceptable acid addition salt, such as the HCl, HBr, acetic, benzoic, toluene sulfonic, maleic, tartaric and other organic salts, or may be converted to an amide. Hydroxyl groups of the peptide side chains may be converted to alkoxy or to an ester using well recognized techniques. Phenyl and phenolic rings of the peptide side chains may be substituted with one or more halogen atoms, such as fluorine, chlorine, bromine or iodine, or with alkyl, alkoxy, carboxylic acids and esters thereof, or amides of such carboxylic acids. Thiols can be protected with any one of a number of well recognized protecting groups, such as acetamide groups.

[0184] Further particularly preferred in this regard are variants, analogs, derivatives and fragments, and variants, analogs and derivatives of the fragments, having the amino acid sequence of any polypeptide according to the present invention as disclosed herein and preferably set forth in the Sequence Listing, in which several, a few, 5 to 10, 1 to 5, 1 to 3, 2, 1 or no amino acid residues are substituted, deleted or added, in any combination. Especially preferred among these are silent substitutions, additions and deletions, which do not alter the properties and activities of the peptide of the present invention. Also especially preferred in this regard are conservative substitutions. Most highly preferred are peptides having an amino acid sequence set forth in the Sequence Listing without substitutions.

[0185] Variants of any of the antigens in their various embodiments disclosed herein and in particular the antigens and peptides specified herein by SEQ ID NOs 887 to 913 or 215 to 428, can typically also be characterized by means of bioinformatics. Respective tools such as the NCBI Basic Local Alignment Search Tool (BLAST) (Altschul, S. et al., 1990) are available from several sources, including the National Center for Biotechnology Information (NCBI, Bethesda, Md.) and on the Internet, for use in connection with the sequence analysis programs blastp, blastn, blastx, tblastn and tblastx. For comparisons of amino acid sequences of at least 35 amino acids, the Blast 2 sequences function of NCBI Blast 2.0 was employed using the default BLOSUM62 matrix set to default parameters (gapped blastp; gap existence cost of 11, and a per residue gap cost of 1). When aligning short peptides (fewer than around 35 amino acids), the alignment is performed using the Blast 2 sequences function, employing the PAM30 matrix set to default parameters (open gap 9, extension gap 1 penalties). Methods for determining sequence identity over such short windows such as 15 amino acids or less are described at the website that is maintained by the National Center for Biotechnology Information in Bethesda, Md. (http://www.ncbi.nlm.nih.gov/BLAST/).

[0186] The active variant of an antigen is obtained by sequence alterations in the antigen, including each and any variant, fragment, analogue or derivative thereof, if not explicitly indicated to the contrary, wherein the polypeptide according to the present invention with the sequence alterations retains a function of the unaltered polypeptide according to the present invention, e.g. having a biological activity similar to that displayed by the complete antigen, including the ability to induce an immune response and/or to show protection against an Mcat organism e.g. in a mouse model of Mcat infection. Suitable animal models are reviewed in T. F. Murphy 2005.

[0187] A further example of retaining the function of the unaltered polypeptide according to the present invention is that the active variant of the antigen specifically binds a polypeptide specific antibody that binds an unaltered form of the polypeptide according to the present invention. By “biological function” or “biological activity” is preferably meant a function of the polypeptide in cells or organisms in which it naturally occurs, even if the function is not necessary for the growth or survival of the cells and organisms, respectively. For example, the biological function of a porin is to allow the entry into cell of compounds present in the extracellular medium. The biological function is distinct from the antigenic function. A polypeptide according to the present invention can have more than one biological function.

[0188] The sequence alterations of such variants can include, but are not limited to, conservative substitutions, deletions, mutations and insertions. Among preferred variants are those that vary from a reference by conservative amino acid substitutions. Conservative substitutions are those that substitute a given amino acid in a polypeptide according to the present invention by another amino acid of like characteristics, i.e. those substitutions that take place within a family of amino acids that are related in their side chains and chemical properties. Examples of such families are amino acids with basic side chains, with acidic side chains, with non-polar aliphatic side chains, with non-polar aromatic side chains, with uncharged polar side chains, with small side chains, with large side chains, etc. Typically seen as conservative substitutions are the replacements, one for another, among the aliphatic amino acids Ala, Val, Leu and Ile; interchange of the hydroxyl residues Ser and Thr, exchange of the acidic residues Asp and Glu, substitution between the amide residues Asn and Gln, exchange of the basic residues Lys and Arg and replacements among the aromatic residues Phe and Tyr.

[0189] In one embodiment, one conservative substitution is included in the peptide. In another embodiment, two conservative substitutions or less are included in the peptide. In a further embodiment, three conservative substitutions or less are included in the peptide.

[0190] Examples of conservative amino acid substitutions include, but are not limited to, those listed below:

| Original Residue | Conservative Substitutions |
|---|---|
| Ala | Ser |
| Arg | Lys |
| Asn | Gln; His |
| Asp | Glu |
| Cys | Ser |
| Gln | Asn |
| Glu | Asp |
| His | Asn; Gln |
| Ile | Leu; Val |
| Leu | Ile; Val |
| Lys | Arg; Gln; Asn |
| Met | Leu; Ile |
| Phe | Met; Leu; Tyr |
| Ser | Thr |
| Thr | Ser |
| Trp | Tyr |
| Tyr | Trp; Phe |
| Val | Ile; Leu |

[0191] Preferably, the active variant exhibits reactivity with human sera of patients with Mcat infections, more preferably mediates seroconversion and most preferably shows bactericidal activity. These characteristics of the active variant can be assessed e.g. as detailed in the Examples. In the context of the present invention a variant specifically binds a specific antibody (preferably being polyclonal antibodies raised against recombinant proteins in animals such as mouse, rabbit or monoclonal antibodies generated in mouse), exhibits reactivity with human sera from patients with Mcat infections, mediates seroconversion or shows bactericidal activity, if the activity of the variant amounts to at least 10%, preferably at least 25%, more preferably at least 50%, even more preferably at least 70%, still more preferably at least 80%, especially at least 90%, particularly at least 95%, most preferably at least 99% of the activity of the antigen without sequence alterations.

[0192] Said active variants include naturally-occurring allelic variants, as well as mutants or any other non-naturally occurring variants. As is known in the art, an allelic variant is an alternate form of a (poly)peptide that is characterized as having a substitution, deletion, or addition of one or more amino acids that does essentially not alter the biological function of the polypeptide, as it is described above.

[0193] Within any species of the living world, allelic variation is the rule. For example, any bacterial species, e.g. Mcat, is usually represented by a variety of strains (characterized by clonal reproduction) that differ from each other by minor allelic variations. Indeed, a polypeptide that fulfils the same biological function in different strains can have an amino acid sequence that is not identical in each of the strains. Such an allelic variation is equally reflected at the nucleotide level.

[0194] In a preferred embodiment, the active variant or the active fragment derived from the polypeptide according to the present invention by amino acid exchanges, deletions or insertions may also conserve, or more preferably improve, the activity (reactivity, seroconversion and/or bactericidal activity as defined herein). Furthermore, these polypeptides may also cover epitopes, which trigger the same or preferably an improved T cell response. These epitopes are referred to as “heteroclitic” as further defined herein. They have a similar or preferably greater affinity to MHC/HLA molecules, and the ability to stimulate the T cell receptors (TCR) directed to the original epitope in a similar or preferably stronger manner. Heteroclitic epitopes can be obtained by rational design i.e. taking into account the contribution of individual residues to binding to MHC/HLA as for instance described by Rammensee H. et al., (1999), combined with a systematic exchange of residues potentially interacting with the TCR and testing the resulting sequences with T cells directed against the original epitope. Such a design is possible for a skilled person in the art without undue experimentation.

[0195] In a still more preferred embodiment of the invention the active variant of a polypeptide according to the present invention is any of the polypeptides disclosed herein and more specifically any of the polypeptides defined by the SEQ ID NOs 887 to 913 or 215 to 428, having at least 50% sequence identity to the polypeptides of any of said SEQ ID NOs 887 to 913 or 215 to 428, especially at least 60%, preferably at least 70%, more preferably at least 80%, still more preferably at least 90%, even more preferably at least 95%, 96%, 97%, 98%, most preferably 99% sequence identity to the polypeptides of any of said SEQ ID NOs 887 to 913 or 215 to 428 and/or is derived from said polypeptides of any of the sequences of SEQ ID NOs 887 to 913 or 215 to 428 by conservative substitutions as defined above.

[0196] The polypeptides according to the present invention, and fragments and variants thereof, also include or consist of modified epitopes wherein preferably one or two of the amino acids of a given epitope are modified or replaced according to the rules disclosed in, e.g., Tourdot, S. et al., (2000), as well as the nucleic acid sequences encoding such modified epitopes. The epitopes as presented by the polypeptides according to the present invention are also referred to herein as the present epitopes.

[0197] It is clear that also epitopes derived from the present epitopes by amino acid exchanges improving, conserving or at least not significantly impeding the T cell activating capability of the epitopes are covered by the epitopes according to the present invention. Therefore the present epitopes also cover epitopes which do not contain the original sequence as derived from Mcat, but trigger the same or preferably an improved T cell response. These epitope are referred to as “heteroclitic”; they need to have a similar or preferably greater affinity to MHC/HLA molecules the ability to stimulate the T cell receptors (TCR) directed to the original epitope in a similar or preferably stronger manner.

[0198] Another possibility for identifying epitopes and more specifically heteroclitic epitopes includes the screening of peptide libraries with T cells directed against one or several of the present epitopes. A preferred way is the positional scanning of synthetic peptide libraries. Such approaches have been described in detail for instance by Hemmer, B. et al., (1999) and the references given therein.

[0199] As an alternative to epitopes represented by the present derived amino acid sequences or heteroclitic epitopes as disclosed herein, also substances or compounds mimicking these epitopes which are also referred to herein as “peptidemimetica” or “retro-inverse-peptides” can be applied and are thus within the present invention.

[0200] Another aspect of the design of improved epitopes is their formulation or modification with substances increasing their capacity to stimulate T cells. These include T helper cell epitopes, lipids or liposomes or preferred modifications as described in WO 01/78767.

[0201] Another way to increase the T cell stimulating capacity of epitopes is their formulation with immune stimulating substances, for instance cytokines or chemokines, like interleukin-2, -7, -12, -18, class I and II interferons (IFN), especially IFN-γ, GM-CSF, TNF-alpha, flt3-ligand and others.

[0202] The polypeptides according to the present invention are preferably provided in an isolated form, and preferably are purified to homogeneity.

[0203] In another embodiment of the present invention the variant is a fragment. The fragment is characterized by being derived from the antigen as defined above by one or more amino acid deletions. The deletion(s) may be C-terminal, N-terminal and/or internal. Preferably the fragment is obtained by at most 10, 20, 30, 40, 50, 60, 80, 100, 150 or 200, more preferably by at most 10, 20, 30, 40 or 50, even more preferably at most 5, 10 or 15, still more preferably at most 5 or 10, most preferably 1, 2, 3, 4 or 5 deletion(s). The active fragment of the invention is characterized by having a biological activity similar to that displayed by the complete antigen, including the ability to induce an immune response and/or to show protection against Mcat, e.g. in a mouse model of Mcat infection, such as described above. The fragment of an antigen is active in the context of the present invention if the activity of the fragment amounts to at least 10%, preferably at least 25%, more preferably at least 50%, even more preferably at least 70%, still more preferably at least 80%, especially at least 90%, particularly at least 95%, most preferably at least 99% of the activity of the antigen without sequence alteration. These fragments may be designed or obtained in any desired length, including as small as about 50 to 80 amino acids in length.

[0204] In a further embodiment a fragment, and more preferably an active fragment, of the polypeptide according to the present invention are characterised by structural or functional attributes, i.e. fragments that comprise alpha-helix and alpha-helix forming regions, beta-sheet and beta-sheet forming regions, turn and turn-forming regions, coil and coil-forming regions, hydrophilic regions, hydrophobic regions, alpha-amphipathic regions, beta-amphipathic regions, flexible regions, surface-forming regions, substrate binding regions, and high antigenic index regions of the polypeptide according to the present invention, and combinations of such fragments. Preferred regions are those that mediate antigenicity and antibody binding activities of the polypeptides according to the present invention. Most highly preferred in this regard are fragments that have a chemical, biological or other activity of the antigen and fragments thereof of the present invention, including those with a similar activity or an improved activity, whereby such improved activities are immunogenicity and stability, or with a decreased undesirable activity, whereby such decreased undesirable activity is enzymatic and/or toxic function and generation of human cross-reactive antibodies. Particularly preferred are fragments comprising receptors or domains of enzymes that confer a function essential for viability of Mcat, or the ability to cause disease in humans. Further preferred fragments of the polypeptides according to the present invention are those that comprise or contain antigenic or immunogenic determinants in an animal, especially in a human. Such fragments are also referred to as antigenic fragments.

[0205] An antigenic fragment is preferably defined as a fragment, which is antigenic by itself or may be made antigenic when provided as a hapten. Therefore, also antigens or antigenic fragments showing one or, particularly for longer fragments, only a few amino acid exchanges are enabled by the present invention, provided that the antigenicity or antigenic capacities of such fragments with amino acid exchanges are not severely deteriorated on the exchange(s), i.e., suited for eliciting an appropriate immune response in an individual vaccinated with this antigen and identified by individual antibody preparations from individual sera.

[0206] Preferred examples of such fragments of the polypeptides according to the present invention are the core amino acid sequence as indicated in Table 4.

[0207] All these fragments listed in Table 4 individually and each independently form a preferred selected aspect of the present invention.

[0208] It will be appreciated that the invention also relates to, among others, nucleic acid molecules encoding the aforementioned fragments, variants, active variants, and active fragments, nucleic acid molecules that hybridise to nucleic acid molecules encoding the fragments, variants, active variants, and active fragments, particularly those that hybridise under stringent conditions, and nucleic acid molecules, such as PCR primers, for amplifying nucleic acid molecules that encode the fragments. In these regards, preferred nucleic acid molecules are those that correspond to the preferred fragments, as discussed above.

[0209] The polypeptides according to the present invention may be expressed in a modified form, such as a fusion protein, and may include not only secretion signals but also additional heterologous functional regions. Thus, for instance, a region of additional amino acids, particularly charged amino acids, may be added to the N- or C-terminus of the polypeptide to improve stability and persistence in the host cell, during purification or during subsequent handling and storage. Also, regions may be added to the polypeptide to facilitate purification or to enhance expression. Such regions may be removed prior to final preparation of the polypeptide. The addition of peptide moieties to polypeptides to engender secretion or excretion, to improve stability, to enhance expression or to facilitate purification, among others, are familiar and routine techniques in the art. A preferred fusion protein comprises a heterologous region from immunoglobulin that is useful to solubilize or purify polypeptides. For example, EP 0464533 discloses fusion proteins comprising various portions of constant region of immunoglobin molecules together with another protein or part thereof. In drug discovery, for example, proteins have been fused with antibody Fc portions for the purpose of high-throughout screening assays to identify antagonists. See for example, (Bennett, D. et al., 1995) and (Johanson, K. et al., 1995). Fusions also may include the polypeptides according to the present invention fused or coupled to moieties other than amino acids, including lipids and carbohydrates. Further, antigens of this invention may be employed in combination with other vaccinal agents described by the prior art, as well as with other species of vaccinal agents derived from other microorganisms. Such proteins are useful in the prevention, treatment and diagnosis of diseases caused by a wide spectrum of Mcat isolates.

[0210] In a further embodiment the peptide of the invention is fused to an epitope tag which provides an epitope to which an anti-tag substance can selectively bind. The epitope tag is generally placed at the amino- or carboxyl-terminus of the peptide but may be incorporated as an internal insertion or substitution as the biological activity permits. The presence of such epitope-tagged forms of a peptide can be detected using a substance such as an antibody against the tagged peptide. Also, provision of the epitope tag enables the peptide to be readily purified by affinity purification using an anti-tag antibody or another type of affinity matrix that binds to the epitope tag. Various tag polypeptides and their respective antibodies are well known in the art. Examples include poly-histidine (poly-his), poly-histidine-glycine (poly-his-gly) tags, the HA tag polypeptide, the c-myc tag, the Strep tag and the FLAG tag.

[0211] The polypeptides of the invention may be prepared by any of a number of conventional techniques. For example, they can be produced by chemical synthesis as well as by biotechnological means. The latter comprise the transfection or transformation of a host cell with a vector containing a nucleic acid according to the present invention. In a preferred embodiment the vector is a vector according to the present invention. The biotechnological production of the polypeptides according to the present invention further comprises the cultivation of the transfected or transformed host cell under conditions that allow expression of the protein and which are known to the one skilled in the art. The expressed protein is recovered, isolated, and optionally purified from the cell (or from the culture medium, if expressed extracellularly) by appropriate means known to one of skill in the art. For example, the proteins are isolated in soluble form following cell lysis, or extracted using known techniques, e.g. in guanidine chloride. The molecules comprising the polypeptides and antigens of this invention may be further purified using any of a variety of conventional methods including, but not limited to: ammonium sulfate or ethanol precipitation, acid extraction, liquid chromatography such as normal or reversed phase, using HPLC, FPLC and the like; affinity chromatography (such as with inorganic ligands or monoclonal antibodies), size exclusion chromatography, anion or cation exchange chromatography, phosphocellulose chromatography, hydrophobic interaction chromatography, hydroxylapatite chromatography, lectin chromatography, immobilized metal chelate chromatography, gel electrophoresis, and the like. One of skill in the art may select the most appropriate isolation and purification techniques without departing from the scope of this invention. Such purification provides the antigen in a form substantially free from other proteinaceous and non-proteinaceous materials of the microorganism.

[0212] An alternative approach to prepare polypeptides according to the invention involves generating the fragments of known peptides by enzymatic digestion, e.g., by treating the protein with an enzyme known to cleave proteins at sites defined by particular amino acid residues, or by digesting the DNA with suitable restriction enzymes, expressing the digested DNA and isolating the desired fragment. Yet another suitable technique involves isolating and amplifying a DNA fragment encoding a desired peptide fragment, by polymerase chain reaction (PCR). Oligonucleotides that define the desired termini of the DNA fragment are employed as the 5′ and 3′ primers in the PCR. Techniques for making mutations, such as deletions, insertions and substitutions, at predetermined sites in DNA, and therefore in proteins, having a known sequence are well known. One of skill in the art using conventional techniques, such as PCR, may readily use the antigens and peptides provided herein to identify and isolate other similar proteins. Such methods are routine and not considered to require undue experimentation, given the information provided herein. For example, variations can be made using oligonucleotide-mediated site-directed mutagenesis (Carter, P. et al., 1985; Zoller, M. J. et al., 1987), cassette mutagenesis (Wells, J. A. et al., 1985), restriction selection mutagenesis (Wells, J. A. et al., 1986), PCR mutagenesis, or other known techniques can be performed on the cloned DNA to produce the peptide of the invention.

[0213] The polypeptide according to the present invention may be used for the detection of the organism or organisms in a sample containing these organisms or proteins or antigens, including fragments thereof. Preferably such detection is for diagnosis, more preferable for the diagnosis of a disease, most preferably for the diagnosis of a disease related or linked to the presence or abundance of Gram-negative bacteria, especially pathogenic Mcat species.

[0214] The nucleic acids according to the present invention can also be used for the diagnosis or detection of organisms in a sample, whereby the organisms are preferably the same ones as disclosed in connection with the use of the polypeptides according to the present invention and the antibody according to the present invention, respectively. Basically, it is within the skills of the person of the art to design and practice such diagnosis and detection assays and methods, respectively, in the light of the present disclosure. More preferably such diagnosis or detection uses primers or probes to specifically interact with the nucleic acid molecules according to the present invention. The length and design of such primers and probes, respectively, varies depending on the particular method or diagnosis practiced. Using, in a preferred embodiment, a primer for, e.g., a PCR based detection or diagnosis system, i.e. method or assay, the length of the primer will range from about 10 nucleotides to about 30 nucleotides and more preferably from about 16 to 25 nucleotides. In case of a probe based detection or diagnosis system the length of the probe is preferably about the same as specified for the primer based system. Additionally, in case of a probe based system, the probe will comprise a moiety which allows its detection, either directly or indirectly. Such moiety for direct detection can be a radioactive label or a fluorescence label as known to the ones skilled in the art. Such moiety for indirect detection can be a biotin or any other moiety which mediates interaction with a further compound which in turn is labelled so as to allow its detection.

[0215] The present invention also relates to diagnostic assays, such as quantitative diagnostic assays for detecting levels of the polypeptides according to the present invention, and more preferably antigens and fragments thereof of the present invention, in cells and tissues, including determination of normal and abnormal levels. Thus, for instance, a diagnostic assay in accordance with the invention for detecting over-expression of the polypeptides according to the present invention compared to normal control tissue samples may be used to detect the presence of an infection, for example, and to identify the infecting organism. Assay techniques that can be used to determine levels of such polypeptides in a sample derived from a host are well known to those of skill in the art. Such assay methods include radioimmunoassays, competitive-binding assays, Western Blot analysis and ELISA assays. Among these, ELISA and Western Blot analysis frequently are preferred. An ELISA assay initially comprises preparing an antibody specific to one of the polypeptides according to the present invention, preferably a monoclonal antibody. In addition, a reporter antibody generally is prepared which binds to the monoclonal antibody. The reporter antibody is attached to a detectable reagent such as radioactive, fluorescent or enzymatic reagent, such as horseradish peroxidase enzyme. One or several of the polypeptides according to the present invention and more preferably an antigen and fragment thereof according to the present invention may be immobilised on ELISA plates for detection of reactive antibodies in sera of patients or subjects to be tested.

[0216] A Western blot assay initially separates the polypeptides according to the present invention individually or in combination by SDS-polyacrylamide gel electrophoresis and which subsequently are transferred and immobilised onto a solid support matrix, such as nitrocellulose, nylon or combinations thereof. Together with a reporter antibody reactive antibodies can be detected. The reporter antibody is attached to a detectable reagent such as radioactive, fluorescent or enzymatic reagent, such as horseradish peroxidase enzyme.

[0217] The polypeptides according to the present invention or the nucleic acid molecules according to the present invention or primers or probes directed thereto as described herein, may also be used for the purpose of or in connection with an array. In case of the nucleic acid molecule according to the present invention and the primers and probes directed there against, the length of the probes and the primer, can also preferably be in the range from about 25 to about 75 nucleotides, more preferably from about 35 to about 50 nucleotides. More particularly, at least one of the polypeptides according to the present invention may be immobilized on a support. Said support typically comprises a variety of the polypeptides according to the present invention and/or antigens and fragments thereof whereby the variety may be created by using one or several of the antigens and fragments thereof according to the present invention and/or antigens and fragments thereof being different. The characterizing feature of such array as well as of any array in general is the fact that at a distinct or predefined region or position on said support or a surface thereof, a distinct polypeptide is immobilized. Because of this, any activity at a distinct position or region of an array can be correlated with a specific polypeptide. The number of different polypeptides and more preferably different antigens and fragments thereof immobilized on a support may range from as little as 10 to several 1,000 different polypeptides and antigens and fragments thereof, respectively. The density of said molecules per cm² is in a preferred embodiment as little as 10 per cm² to at least 400 different of such polypeptides per cm² and more particularly at least 1,000 different of such polypeptides and more preferably different antigens and fragments thereof per cm². What is said herein about the immobilization of the polypeptides according to the present invention and their use, is also applicable to the nucleic acid molecules and the primers and probes, respectively, directed there against, as will be acknowledged by the ones skilled in the art.

[0218] The manufacture of such arrays is known to the one skilled in the art and, for example, described in U.S. Pat. No. 5,744,309. The array preferably comprises a planar, porous or non-porous solid support having at least a first surface. The polypeptides according to the present invention are immobilized on said surface. Preferred support materials are, among others, glass or cellulose. It is also within the present invention that the array is used for any of the diagnostic applications described herein. Apart from the polypeptides according to the present invention also the nucleic acid molecules according to the present invention may be used for the generation of an array as described above which, in principle, can be used for any of the purposes disclosed for the array containing polypeptides. This applies as well to an array made of antibodies, preferably monoclonal antibodies as, among others, described herein.

[0219] In a further aspect the present invention relates to an antibody directed to any of polypeptides according to the present invention, derivatives, fragments, variants, active fragments and active variants thereof according to the present invention. The present invention includes, for example, monoclonal and polyclonal antibodies, chimeric, single chain, and humanized antibodies, as well as Fab fragments, or the product of a Fab expression library. It is within the present invention that the antibody may be chimeric, i.e. that different parts thereof stem from different species or at least the respective sequences are taken from different species.

[0220] Such antibodies in general and in particular directed against the antigens and fragments thereof corresponding to a sequence of the present invention can be obtained by direct injection of a polypeptide according to the present invention into an animal or by administering said polypeptide to an animal, preferably a non-human. The antibody so obtained will then bind said polypeptide itself. In this manner, even a sequence encoding only a fragment said polypeptide can be used to generate antibodies binding the whole native polypeptides according to the present invention. Such antibodies can then be used to isolate the polypeptide according to the present invention from tissue expressing antigens and fragments thereof. It will be understood by the ones skilled in the art that this procedure is also applicable to the fragments, variants, active fragments and active variants thereof of said polypeptides.

[0221] Another aspect of the present invention relates to methods for producing antibodies according to the invention. This includes, for example, monoclonal and polyclonal antibodies, chimeric, single chain, and humanized antibodies, as well as Fab fragments, or the product of an Fab expression library, which are able to specifically bind to the peptide or composition according to the invention.

[0222] In a preferred embodiment the antibody is a monoclonal, polyclonal, chimeric or humanized antibody or functionally active fragment thereof. In another preferred embodiment the functionally active fragment comprises a Fab fragment.

[0223] Antibodies generated against the peptide or antigen or composition according to the invention can be obtained by direct injection of the peptide or antigen or composition according to the invention into an animal or administering of the peptide or antigen or composition according to the invention to an animal, preferably a non-human. The antibody so obtained will then bind the peptide or antigen or composition according to the invention. Such antibodies can then be used to isolate reactive antigens, peptide or proteins from a tissue expressing those.

[0224] For preparation of monoclonal antibodies, any technique known in the art which provides antibodies produced by continuous cell line cultures, can be used (as described originally in Köhler, G. et al., 1975).

[0225] Techniques described for the production of single chain antibodies (U.S. Pat. No. 4,946,778) can be adapted to produce single chain antibodies to immunogenic antigens and fragments thereof in their diverse embodiments according to this invention. Also, transgenic mice, or other organisms such as other mammals, may be used to express humanized antibodies to the polypeptides according to the present invention.

[0226] Antibodies may also be produced using a hybridoma cell line.

[0227] Still another aspect of the invention relates to a hybridoma cell line which produces the antibody of the invention.

[0228] Hybridoma cell lines expressing desirable monoclonal antibodies are generated by well-known conventional techniques. The hybridoma cell can be generated by fusing a normal-activated, antibody-producing B cell with a myeloma cell. In the context of the present invention the hybridoma cell is able to produce an antibody specifically binding to the antigen of the invention.

[0229] Similarly, desirable high titre antibodies are generated by applying known recombinant techniques to the monoclonal or polyclonal antibodies developed to these antigens (see, e.g., PCT Patent Application No. PCT/GB85/00392; British Patent Application Publication No. GB2188638A; Amit, A. G. et al., 1986; Queen, C. et al., 1989; PCT Patent Application No. WO 90/07861; Riechmann, L. et al., 1988; Huse, W. D. et al., 1988).

[0230] Alternatively, the antibody may be produced employing display libraries. For example, phage display technology or ribosomal display could be utilized to select antibody genes with binding activities towards the polypeptides according to the present invention either from repertoires of PCR amplified v-genes of lymphocytes from humans screened for possessing respective target antigen binding antibodies or from naïve libraries (McCafferty, J. et al., 1990; Marks, J. et al., 1992). The affinity of these antibodies can also be improved by chain shuffling (Clackson, T. et al., 1991).

[0231] If two antigen binding domains are present, each domain may be directed against a different epitope—termed ‘bispecific’ antibodies.

[0232] The above-described antibodies may be employed to isolate or to identify clones expressing the polypeptides according to the present invention by attachment of the antibody to a solid support for isolation and/or purification by affinity chromatography.

[0233] Thus, among others, antibodies against the polypeptides according to the present invention may be employed to inhibit and/or treat infections, particularly bacterial infections and especially infections arising from pathogenic Mcat species.

[0234] The polypeptides according to the present invention and more specifically antigens and fragments thereof in their diverse embodiments include antigenically, epitopically or immunologically equivalent derivatives, which form a particular aspect of this invention. The term “antigenically equivalent derivative” as used herein encompasses such polypeptide according to the present invention or its equivalent which will be specifically recognized by certain antibodies which, when raised to said polypeptide, interfere with the interaction between pathogen and mammalian host. The term “immunologically equivalent derivative” as used herein encompasses a peptide or its equivalent which when used in a suitable formulation to raise antibodies in a vertebrate, the antibodies act to interfere with the interaction between pathogen and mammalian host.

[0235] The polypeptides according to the present invention and more specifically the antigens and fragments thereof in their diverse embodiments, such as an antigenically or immunologically equivalent derivative or a fusion protein thereof can be used as an antigen to immunize a mouse or other animal such as a rat or chicken. The fusion protein may provide stability to the polypeptide according to the present invention. Such polypeptide may be associated, for example by conjugation, with an immunogenic carrier protein, for example bovine serum albumin (BSA) or keyhole limpet haemocyanin (KLH). Alternatively, an antigenic peptide comprising multiple copies of the polypeptide according to the present invention and more preferably an antigen and fragments thereof, or an antigenically or immunologically equivalent antigen and fragments thereof, may be sufficiently antigenic to improve immunogenicity so as to obviate the use of a carrier.

[0236] Preferably the antibody or derivative thereof is modified to make it less immunogenic in the individual. For example, if the individual is human the antibody may most preferably be “humanized”, wherein the complementarity determining region(s) of the hybridoma-derived antibody has been transplanted into a human monoclonal antibody, for example as described in (Jones, P. et al., 1986) or (Tempest, P. et al., 1991).

[0237] The use of a nucleic acid molecule according to the present invention in genetic immunization will preferably employ a suitable delivery method such as direct injection of plasmid DNA into muscle, delivery of DNA complexed with specific protein carriers, coprecipitation of DNA with calcium phosphate, encapsulation of DNA in various forms of liposomes, particle bombardment (Tang, D. et al., 1992; Eisenbraun, M. et al., 1993) and in vivo infection using cloned retroviral vectors (Seeger, C. et al., 1984).

[0238] In a further aspect the present invention relates to a peptide binding to any of the polypeptides according to the present invention, and a method for the preparation of such peptides whereby the method is characterized by the use of said polypeptide and the basic steps are known to the one skilled in the art.

[0239] Such peptides may be generated by using methods according to the state of the art such as phage display or ribosome display. In case of phage display, basically a library of peptides is generated in the form of phages, and this kind of library is contacted with the target molecule, in the present case a polypeptide according to the present invention. Those peptides binding to the target molecule are subsequently removed, preferably as a complex with the target molecule, from the respective reaction. It is known to the one skilled in the art that the binding characteristics, at least to a certain extent, depend on the particularly realized experimental set-up such as the salt concentration and the like. After separating those peptides binding to the target molecule with a higher affinity or a bigger force, from the non-binding members of the library, and optionally also after removal of the target molecule from the complex of target molecule and peptide, the respective peptide(s) may subsequently be characterised. Prior to the characterisation optionally an amplification step is realized such as, e.g. by propagating the peptide encoding phages. The characterisation preferably comprises the sequencing of the target binding peptides. Basically, the peptides are not limited in their lengths, however preferably peptides having a length from about 8 to 20 amino acids are preferably obtained in the respective methods. The size of the libraries may be about 10² to 10¹⁸, preferably 10⁸ to 10¹⁵ different peptides, however, is not limited thereto. In a preferred embodiment such peptides are high-affinity binding peptides. In an even more preferred embodiment the peptides are peptide aptamers.

[0240] Peptide aptamers as used herein refer to peptide molecules that bind a specific target molecule. Peptide aptamers are designed to interfere with other protein interactions inside cells. They consist of a variable peptide loop attached at both ends to a protein scaffold. This double structural constraint greatly increases the binding affinity of the peptide aptamer to levels comparable to that of an antibody (nanomolar range). The variable loop length is typically comprised of 10 to 20 amino acids, and the scaffold may be any protein which has good solubility and stability properties. Currently, the bacterial protein Thioredoxin-A is the most used scaffold protein, the variable loop being inserted within the reducing active site, which is a -Cys-Gly-Pro-Cys- loop in the wild protein, the two Cysteines' lateral chains being able to form a disulfide bridge. Peptide aptamer selection can be made using different systems, but the most used is currently the yeast two-hybrid system. Selection of Ligand Regulated Peptide Aptamers (LiRPAs) has been demonstrated. By displaying 7 amino acid peptides from a novel scaffold protein based on the trimeric FKBP-rapamycin-FRB structure, interaction between the randomized peptide and target molecule can be controlled by the small molecule Rapamycin or non-immunosuppressive analogs.

[0241] A particular form of target binding peptides as described above, are the so-called “anticalines” which are, among others, described in German patent application DE 19742706. In so far, the present invention is also related to peptides specifically binding to the polypeptides according to the present invention and the use thereof for any of the therapeutic and diagnostic applications described herein, preferably for antibodies.

[0242] In a further aspect the present invention relates to functional nucleic acids interacting with any of the polypeptides according to the present invention, and a method for the preparation of such functional nucleic acids whereby the method is characterized by the use of the polypeptides according to the present invention and the basic steps are known to the one skilled in the art. The functional nucleic acids are preferably nucleic acid aptamers and spiegelmers. In so far, the present invention is also related to nucleic acid aptamers and spiegelmers specifically binding to the polypeptides according to the present invention and the use thereof for any of the therapeutic and diagnostic applications described herein, preferably for antibodies.

[0243] Nucleic acid aptamers are D-nucleic acids, which are either single stranded or double stranded and which specifically interact with a target molecule. The preparation or selection of aptamers is, e.g. described in European patent EP 0533838. Basically the following steps are realized. First, a mixture of nucleic acids, i.e. potential aptamers, is provided whereby each nucleic acid typically comprises a segment of several, preferably at least eight subsequent randomised nucleotides. This mixture is subsequently contacted with the target molecule whereby the nucleic acid(s) bind to the target molecule, such as based on an increased affinity towards the target or with a bigger force thereto, compared to the candidate mixture. The binding nucleic acid(s) are/is subsequently separated from the remainder of the mixture. Optionally, the thus obtained nucleic acid(s) is amplified using, e.g. polymerase chain reaction. These steps may be repeated several times giving at the end a mixture having an increased ratio of nucleic acids specifically binding to the target from which the final binding nucleic acid is then optionally selected. These specifically binding nucleic acid(s) are referred to as aptamers. It is obvious that at any stage of the method for the generation or identification of the aptamers samples of the mixture of individual nucleic acids may be taken to determine the sequence thereof using standard techniques. It is within the present invention that the aptamers may be stabilized such as, e.g., by introducing defined chemical groups which are known to the one skilled in the art of generating aptamers. Such modification may for example reside in the introduction of an amino group at the 2′-position of the sugar moiety of the nucleotides. Aptamers are currently used as therapeutic agents. However, it is also within the present invention that the thus selected or generated aptamers may be used for target validation and/or as lead substance for the development of pharmaceutical compositions, preferably of pharmaceutical compositions based on small molecules. This is actually done by a competition assay whereby the specific interaction between the target molecule and the aptamer is inhibited by a candidate drug whereby upon replacement of the aptamer from the complex of target and aptamer it may be assumed that the respective drug candidate allows a specific inhibition of the interaction between target and aptamer, and if the interaction is specific, said candidate drug will, at least in principle, be suitable to block the target and thus decrease its biological availability or activity in a respective system comprising such target. The thus obtained small molecule may then be subject to further derivatisation and modification to optimise its physical, chemical, biological and/or medical characteristics such as toxicity, specificity, biodegradability and bioavailability.

[0244] Spiegelmers and their generation or preparation is based on a similar principle. The preparation of spiegelmers is described in international patent application WO 98/08856. Spiegelmers are L-nucleic acids, which means that they are composed of L-nucleotides rather than D-nucleotides, as aptamers are. Spiegelmers are characterized by the fact that they have a very high stability in biological systems and, comparable to aptamers, specifically interact with the target molecule against which they are directed. In the process of generating spiegelmers, a heterogeneous population of D-nucleic acids is created and this population is contacted with the optical antipode of the target molecule, in the present case for example with the D-enantiomer of the naturally occurring L-enantiomer of the antigens and fragments thereof according to the present invention. Subsequently, those D-nucleic acids are separated which do not interact with the optical antipode of the target molecule. But those D-nucleic acids interacting with the optical antipode of the target molecule are separated, optionally identified and/or sequenced and subsequently the corresponding L-nucleic acids are synthesized based on the nucleic acid sequence information obtained from the D-nucleic acids. These L-nucleic acids, which are identical in terms of sequence with the aforementioned D-nucleic acids interacting with the optical antipode of the target molecule, will specifically interact with the naturally occurring target molecule rather than with the optical antipode thereof. Similar to the method for the generation of aptamers it is also possible to repeat the various steps several times and thus to enrich those nucleic acids specifically interacting with the optical antipode of the target molecule.

[0245] In a further aspect the present invention relates to functional nucleic acids interacting with any of the nucleic acid molecules according to the present invention, and a method for the preparation of such functional nucleic acids whereby the method is characterized by the use of the nucleic acid molecules and their respective sequences according to the present invention and the basic steps are known to the one skilled in the art. The functional nucleic acids are preferably ribozymes, antisense oligonucleotides and siRNA. In so far, the present invention is also related to this kind of functional nucleic acid specifically binding to the polypeptides according to the present invention and the use thereof for any of the therapeutic and diagnostic applications described herein, preferably for antibodies.

[0246] Ribozymes are catalytically active nucleic acids, which preferably consist of RNA, which basically comprises two moieties. The first moiety shows a catalytic activity whereas the second moiety is responsible for the specific interaction with the target nucleic acid, in the present case the nucleic acid coding for the polypeptides according to the present invention. Upon interaction between the target nucleic acid and the second moiety of the ribozyme, typically by hybridisation and Watson-Crick base pairing of essentially complementary stretches of bases on the two hybridising strands, the catalytically active moiety may become active which means that it catalyses, either intramolecularly or intermolecularly, the target nucleic acid in case the catalytic activity of the ribozyme is a phosphodiesterase activity. Subsequently, there may be a further degradation of the target nucleic acid, which in the end results in the degradation of the target nucleic acid as well as the protein derived from the said target nucleic acid. Ribozymes, their use and design principles are known to the one skilled in the art, and, for example described in (Doherty, E. et al., 2001) and (Lewin, A. et al., 2001).

[0247] The activity and design of antisense oligonucleotides for the preparation of a pharmaceutical composition and as a diagnostic agent, respectively, is based on a similar mode of action. Basically, antisense oligonucleotides hybridise based on base complementarity, with a target RNA, preferably with an mRNA, thereby activating RNase H. RNase H is activated by both phosphodiester and phosphorothioate-coupled DNA. Phosphodiester-coupled DNA, however, is rapidly degraded by cellular nucleases with the exception of phosphorothioate-coupled DNA. These resistant, non-naturally occurring DNA derivatives do not inhibit RNase H upon hybridisation with RNA. In other words, antisense polynucleotides are only effective as DNA RNA hybrid complexes. Examples for this kind of antisense oligonucleotides are described, among others, in U.S. Pat. No. 5,849,902 and U.S. Pat. No. 5,989,912. In other words, based on the nucleic acid sequence of the target molecule which in the present case are the nucleic acid molecules for the antigens and fragments thereof according to the present invention, either from the target protein from which a respective nucleic acid sequence may in principle be deduced, or by knowing the nucleic acid sequence as such, particularly the mRNA, suitable antisense oligonucleotides may be designed base on the principle of base complementarity.

[0248] Particularly preferred are antisense-oligonucleotides, which have a short stretch of phosphorothioate DNA (3 to 9 bases). A minimum of 3 DNA bases is required for activation of bacterial RNase H and a minimum of 5 bases is required for mammalian RNase H activation. In these chimeric oligonucleotides there is a central region that forms a substrate for RNase H that is flanked by hybridising “arms” comprised of modified nucleotides that do not form substrates for RNase H. The hybridising arms of the chimeric oligonucleotides may be modified such as by 2′-O-methyl or 2′-fluoro. Alternative approaches used methylphosphonate or phosphoramidate linkages in said arms. Further embodiments of the antisense oligonucleotide useful in the practice of the present invention are P-methoxyoligonucleotides, partial P-methoxyoligodeoxyribonucleotides or P-methoxyoligodeoxy-ribonucleotides.

[0249] Of particular relevance and usefulness for the present invention are those antisense oligonucleotides as more particularly described in the two above mentioned US patents. These oligonucleotides contain no naturally occurring 5′=>3′-linked nucleotides. Rather the oligonucleotides have two types of nucleotides: 2′-deoxyphosphorothioate, which activate RNase H, and 2′-modified nucleotides, which do not. The linkages between the 2′-modified nucleotides can be phosphodiester, phosphorothioate or P-ethoxyphosphodiester. Activation of RNase H is accomplished by a contiguous RNase H-activating region, which contains between 3 and 5 2′-deoxyphosphorothioate nucleotides to activate bacterial RNase H and between 5 and 10 2′-deoxyphosphorothioate nucleotides to activate eukaryotic and, particularly, mammalian RNase H. Protection from degradation is accomplished by making the 5′ and 3′ terminal bases highly nuclease resistant and, optionally, by placing a 3′ terminal blocking group.

[0250] More particularly, the antisense oligonucleotide comprises a 5′ terminus and a 3′ terminus; and from position 11 to 59 5′=>3′-linked nucleotides independently selected from the group consisting of 2′-modified phosphodiester nucleotides and 2′-modified P-alkyloxyphosphotriester nucleotides; and wherein the 5′-terminal nucleoside is attached to an RNase H-activating region of between three and ten contiguous phosphorothioate-linked deoxyribonucleotides, and wherein the 3″-terminus of said oligonucleotide is selected from the group consisting of an inverted deoxyribonucleotide, a contiguous stretch of one to three phosphorothioate 2′-modified ribonucleotides, a biotin group and a P-alkyloxyphosphotriester nucleotide.

[0251] Also an antisense oligonucleotide may be used wherein not the 5′ terminal nucleoside is attached to an RNase H-activating region but the 3′ terminal nucleoside as specified above. Also, the 5′ terminus is selected from the particular group rather than the 3′ terminus of said oligonucleotide.

[0252] The nucleic acids as well as the polypeptides according to the present invention in their diverse embodiments may be used as or for the preparation of pharmaceutical compositions, especially vaccines. Preferably such pharmaceutical composition, preferably vaccine is, for the prevention or treatment of diseases caused by, related to or associated with Mcat species. In so far another aspect of the invention relates to a method for inducing an immunological response in an individual, particularly a mammal, which comprises inoculating the individual with the polypeptides according to the present invention in their diverse embodiments, or a fragment or variant thereof, adequate to produce antibodies to protect said individual from infection by the above microorganisms.

[0253] Yet another aspect of the invention relates to a method of inducing an immunological response in an individual which comprises, through gene therapy or otherwise, delivering a nucleic acid molecule according to the present invention, preferably functionally encoding antigens and fragments thereof in their diverse embodiments, for expressing the polypeptide according to the present invention in vivo in order to induce an immunological response to produce antibodies or a cell mediated T cell response, either cytokine-producing T cells or cytotoxic T cells, to protect said individual from disease, whether that disease is already established within the individual or not. One way of administering the gene is by accelerating it into the desired cells as a coating on particles or otherwise.

[0254] A further aspect of the invention relates to an immunological composition which, when introduced into a host capable of having induced within it an immunological response, induces an immunological response in such host, wherein the composition comprises recombinant DNA which codes for and expresses at least one of the polypeptides according to the present invention in their diverse embodiments. The immunological response may be used therapeutically or prophylactically and may take the form of antibody immunity or cellular immunity such as that arising from CTL or CD4+ T cells.

[0255] The polypeptides according to the present invention in their diverse embodiments may be fused with a co-protein which may not by itself produce antibodies, but is capable of stabilizing the first protein and producing a fused protein which will have immunogenic and protective properties. This fused recombinant protein preferably further comprises an antigenic co-protein, such as Glutathione-S-transferase (GST) or beta-galactosidase, relatively large co-proteins which solubilise the protein and facilitate production and purification thereof. Moreover, the co-protein may act as an adjuvant in the sense of providing a generalized stimulation of the immune system. The co-protein may be attached to either the amino or carboxy terminus of the first protein.

[0256] Also provided by this invention are methods using the nucleic acid molecule according to the present invention in their diverse embodiments in such genetic immunization experiments in animal models of infection with Mcat. Such molecules will be particularly useful for identifying protein epitopes able to provoke a prophylactic or therapeutic immune response. This approach can allow for the subsequent preparation of monoclonal antibodies of particular value from the requisite organ of the animal successfully resisting or clearing infection for the development of prophylactic agents or therapeutic treatments of the Mcat infection in mammals, particularly humans.

[0257] The polypeptides according to the present invention in their diverse embodiments may be used as an antigen for vaccination of a host to produce specific antibodies which protect against invasion of bacteria, for example by blocking adherence of bacteria to damaged tissue. Examples of tissue damage and thus damaged tissue include wounds in skin or connective tissue and mucosal tissues caused e.g. by viral infection (esp. respiratory, such as the flu), mechanical, chemical or thermal damage or by implantation of indwelling devices, or wounds in the mucous membranes, such as the mouth, mammary glands, urethra or vagina.

[0258] The present invention also includes a vaccine formulation, which comprises one or several of polypeptides according to the present invention in their diverse embodiments together with one or more suitable carriers and/or excipients. The pharmaceutically acceptable carriers and/or excipients useful in this invention are conventional and may include buffers, stabilizers, diluents, preservatives, and solubilizers. Remington's Pharmaceutical Sciences, by E. W. Martin, Mack Publishing Co., Easton, Pa., 15th Edition (1975), describes compositions and formulations suitable for pharmaceutical delivery of the (poly)peptides herein disclosed. In general, the nature of the carrier or excipients will depend on the particular mode of administration being employed. For instance, parenteral formulations usually comprise injectable fluids that include pharmaceutically and physiologically acceptable fluids such as water, physiological saline, balanced salt solutions, aqueous dextrose, glycerol or the like as a vehicle. For solid compositions (e.g. powder, pill, tablet, or capsule forms), conventional non-toxic solid carriers can include, for example, pharmaceutical grades of mannitol, lactose, starch, or magnesium stearate. In addition to biologically neutral carriers, pharmaceutical compositions to be administered can contain minor amounts of non-toxic auxiliary substances, such as wetting or emulsifying agents, preservatives, and pH buffering agents and the like, for example sodium acetate or sorbitan monolaurate.

[0259] Since said polypeptides according to the present invention may be broken down in the stomach, they are preferably administered parenterally, including, for example, administration that is subcutaneous, intramuscular, intravenous, intradermal, intranasal or transdermal. Formulations suitable for parenteral administration include aqueous and non-aqueous sterile injection solutions which may contain anti-oxidants, buffers, bacteriostats and solutes which render the formulation isotonic with the body fluid, preferably the blood, of the individual; and aqueous and non-aqueous sterile suspensions which may include suspending agents or thickening agents. The formulations may be presented in unit-dose or multi-dose containers, for example, sealed ampoules and vials, and may be stored in a freeze-dried condition requiring only the addition of the sterile liquid carrier immediately prior to use. The vaccine formulation may also include adjuvant systems for enhancing the immunogenicity of the formulation, such as oil-in-water systems and other systems known in the art. The dosage will depend on the specific activity of the vaccine and can be readily determined by routine experimentation.

[0260] According to another aspect, the present invention relates to a pharmaceutical composition comprising one or several of the polypeptides according to the present invention in their diverse embodiments for Mcat. Such a pharmaceutical composition may comprise one, preferably at least two or more of said polypeptides against Mcat species. Optionally, such polypeptides may also be combined with antigens against even further pathogens in a combination pharmaceutical composition. Preferably, said pharmaceutical composition is a vaccine for preventing or treating an infection caused by an Mcat species, more preferably a pathogenic Mcat species, and/or other pathogens against which the antigens have been included in the vaccine.

[0261] According to a further aspect, the present invention relates to a pharmaceutical composition comprising a nucleic acid molecule according to the present invention. Such a pharmaceutical composition may comprise one or more nucleic acid molecules according to the present invention encoding a polypeptide according to the present invention. Optionally, such nucleic acid molecules encoding the polypeptides according to the present invention are combined with nucleic acid molecules encoding antigens against other pathogens in a combination pharmaceutical composition. Preferably, said pharmaceutical composition is a vaccine for preventing or treating an infection caused by Mcat species, more preferably pathogenic Mcat species, and/or other pathogens against which the antigens have been included in the vaccine.

[0262] The pharmaceutical composition may contain any suitable auxiliary substances, such as buffer substances, stabilisers or further active ingredients, especially ingredients known in connection of pharmaceutical composition and/or vaccine production.

[0263] In a preferred embodiment the pharmaceutical composition further comprises an immunostimulatory substance such as an adjuvant. The adjuvant can be selected based on the method of administration and may include polycationic substances, especially polycationic peptides, immunostimulatory nucleic acids molecules, preferably immunostimulatory oligo-deoxynucleotides (ODNs), especially Oligo(dIdC)₁₃, peptides containing at least two LysLeuLys motifs, especially peptide KLKLLLLLKLK, alum, mineral oil-based adjuvants such as Freund's complete adjuvant, Freund's incomplete adjuvant, neuroactive compounds, especially human growth hormone, or any combination of one or more of the above mentioned adjuvants. Other suitable adjuvants may be selected from the group consisting of Montanide incomplete Seppic adjuvant such as ISA, oil in water emulsion adjuvants such as the Ribi adjuvant system, syntax adjuvant formulation containing muramyl dipeptide, or aluminum salt adjuvants or combinations thereof.

[0264] The term “Oligo(dIdC)₁₃” as used in the present invention means a phosphodiester backboned single-stranded DNA molecule containing 13 deoxy (inosine-cytosine) motifs, also defined by the term [oligo-d(IC)₁₃]. The exact sequence is 5′-dIdCdIdCdIdCdIdCdIdCdIdCdIdCdIdCdIdCdIdCdIdCdIdCdIdC-3′. Oligo(dIdC)₁₃ can also be defined by the terms (oligo-dIC₂₆); oligo-dIC₂₆₋ₘₑᵣ; oligo-deoxy IC, 26-mer; or oligo-dIC, 26-mer, as specified for example in WO 01/93903 and WO 01/93905.

[0265] It is also within the scope of the present invention that the pharmaceutical composition, especially a vaccine, comprises apart from one or several of the polypeptides according to the present invention in their diverse embodiments, and/or nucleic acid molecules in accordance with the present invention other compounds which are biologically or pharmaceutically active. Preferably, the vaccine composition comprises at least one polycationic peptide. The polycationic compound(s) to be used according to the present invention may be any polycationic compound, which shows the characteristic effects according to the WO 97/30721. Preferred polycationic compounds are selected from basic polypeptides, organic polycations, basic polyamino acids or mixtures thereof. These polyamino acids should have a chain length of at least 4 amino acid residues (WO 97/30721). Especially preferred are substances like polylysine, polyarginine and polypeptides containing more than 20%, especially more than 50% of basic amino acids in a range of more than 8, especially more than 20, amino acid residues or mixtures thereof. Other preferred polycations and their pharmaceutical compositions are described in WO 97/30721 (e.g. polyethyleneimine) and WO 99/38528. Preferably these polypeptides contain between 20 and 500 amino acid residues, especially between 30 and 200 residues.

[0266] These polycationic compounds may be produced chemically or recombinantly or may be derived from natural sources.

[0267] Cationic (poly)peptides may also be anti-microbial with properties as reviewed in (Ganz, T., 1999). These (poly)peptides may be of prokaryotic or animal or plant origin or may be produced chemically or recombinantly (WO 02/13857). Peptides may also belong to the class of defensins (WO 02/13857). Sequences of such peptides can be, for example, found in the Antimicrobial Sequences Database under the following internet address: http://www.bbcm.univ.trieste.it/˜tossi/pag2.html.

[0268] Such host defence peptides or defensives are also a preferred form of the polycationic polymer according to the present invention. Generally, a compound allowing as an end product activation (or down-regulation) of the adaptive immune system, preferably mediated by APCs (including dendritic cells) is used as polycationic polymer.

[0269] Especially preferred for use as polycationic substances in the present invention are cathelicidin derived antimicrobial peptides or derivatives thereof (International patent application WO 02/13857, incorporated herein by reference), especially antimicrobial peptides derived from mammalian cathelicidin, preferably from human, bovine or mouse.

[0270] Polycationic compounds derived from natural sources include HIV-REV or HIV-TAT (derived cationic peptides, antennapedia peptides, chitosan or other derivatives of chitin) or other peptides derived from these peptides or proteins by biochemical or recombinant production. Other preferred polycationic compounds are cathelin or related or derived substances from cathelin. For example, mouse cathelin is a peptide, which has the amino acid sequence NH₂-RLAGLLRKGGEKIGEKLKKIGQKIKNFFQKLVPQPE-COOH (SEQ ID NO 859). Related or derived cathelin substances contain the whole or parts of the cathelin sequence with at least 15-20 amino acid residues. Derivations may include the substitution or modification of the natural amino acids by amino acids which are not among the 20 standard amino acids. Moreover, further cationic residues may be introduced into such cathelin molecules. These cathelin molecules are preferred to be combined with the antigen. These cathelin molecules surprisingly have turned out to be also effective as an adjuvant for an antigen without the addition of further adjuvants. It is therefore possible to use such cathelin molecules as efficient adjuvants in vaccine formulations with or without further immunactivating substances.

[0271] Another preferred polycationic substance to be used in accordance with the present invention is a synthetic peptide containing at least 2 KLK-motifs separated by a linker of 3 to 7 hydrophobic amino acids (International patent application WO 02/32451, incorporated herein by reference).

[0272] The pharmaceutical composition of the present invention may further comprise immunostimulatory nucleic acid(s). Immunostimulatory nucleic acids are e.g. neutral or artificial CpG containing nucleic acids, short stretches of nucleic acids derived from non-vertebrates or in the form of short oligonucleotides (ODNs) containing non-methylated cytosine-guanine di-nucleotides (CpG) in a certain base context (e.g. described in WO 96/02555). Alternatively, also nucleic acids based on inosine and cytidine as e.g. described in the WO 01/93903, or deoxynucleic acids containing deoxy-inosine and/or deoxyuridine residues (described in WO 01/93905 and WO 02/095027, incorporated herein by reference) may preferably be used as immunostimulatory nucleic acids in connection with the present invention. Preferably, the mixtures of different immunostimulatory nucleic acids may be used according to the present invention.

[0273] It is also within the present invention that any of the aforementioned polycationic compounds is combined with any of the immunostimulatory nucleic acids as aforementioned. Preferably, such combinations are according to the ones as described in WO 01/93905, WO 02/32451, WO 01/54720, WO 01/93903, WO 02/13857, WO 02/095027 and WO 03/047602, incorporated herein by reference.

[0274] In addition or alternatively such vaccine composition may comprise, apart from the polypeptides according to the present invention and the nucleic acid molecules according to the present invention, preferably the coding nucleic acid molecules according to the present invention, a neuroactive compound. Preferably, the neuroactive compound is human growth factor as, e.g. described in WO 01/24822. Also preferably, the neuroactive compound is combined with any of the polycationic compounds and/or immunostimulatory nucleic acids as aforementioned.

[0275] Also, the pharmaceutical composition in accordance with the present invention is a pharmaceutical composition which comprises at least any of the following compounds or combinations thereof: the nucleic acid molecules according to the present invention, the polypeptides according to the present invention in their diverse embodiments, the vector according to the present invention, the cells according to the present invention, the antibody according to the present invention, the functional nucleic acids according to the present invention and the binding peptides such as the anticalines and high-affinity binding peptides and peptide aptamers, respectively, according to the present invention, any agonists and antagonists according to the present invention, preferably screened as described herein. In connection therewith any of these compounds may be employed in combination with a non-sterile or sterile carrier or carriers for use with cells, tissues or organisms, such as a pharmaceutical carrier suitable for administration to a subject. Such compositions comprise, for instance, a media additive or a therapeutically effective amount of an antigen and fragments thereof of the invention and a pharmaceutically acceptable carrier or excipient. Such carriers may include, but are not limited to, saline, buffered saline, dextrose, water, glycerol, ethanol and combinations thereof. The formulation should suit the mode of administration.

[0276] The composition may be used e.g. for immunization or treatment of a subject. The pharmaceutical composition encompasses at least one peptide of the invention; however, it may also contain a cocktail (i.e., a simple mixture) containing different peptides (including fragments and other variants) of the invention, optionally mixed with different antigenic proteins or peptides of other pathogens. Such mixtures of these peptides, polypeptides, proteins or fragments or variants thereof are useful e.g. in the generation of desired antibodies to a wide spectrum of Mcat isolates. The peptide(s) of the present invention may also be used in the form of a pharmaceutically acceptable salt. Suitable acids and bases which are capable of forming salts with the peptides of the present invention are well known to those of skill in the art, and include inorganic and organic acids and bases.

[0277] Still another aspect of the present invention is a pharmaceutical composition containing a nucleic acid selected from the group consisting of

(i) a nucleic acid of the invention and/or a nucleic acid complementary thereto, and
(ii) optionally a pharmaceutically acceptable carrier or excipient.

[0278] The nucleic acid sequences, alone or in combination with other nucleic acid sequences encoding antigens or antibodies or directed to other pathogenic microorganisms, may further be used as components of a pharmaceutical composition. The composition may be used for immunizing or treating humans and/or animals with the disease caused by infection with Mcat. The pharmaceutically acceptable carrier or excipient may be as defined above.

[0279] In another embodiment, the nucleic acid sequences of this invention, alone or in combination with nucleic acid sequences encoding other antigens or antibodies from other pathogenic microorganisms, may further be used in compositions directed to actively induce a protective immune response to the pathogen in a subject. These components of the present invention are useful in methods for inducing a protective immune response in humans and/or animals against infection with Mcat.

[0280] For use in the preparation of the therapeutic or vaccine compositions, nucleic acid delivery compositions and methods are useful, which are known to those of skill in the art. The nucleic acid of the invention may be employed in the methods of this invention or in the compositions described herein as DNA sequences, either administered as naked DNA, or associated with a pharmaceutically acceptable carrier and provide for in vivo expression of the antigen, peptide or polypeptide. So-called “naked DNA” may be used to express the antigen, peptide or polypeptide of the invention in vivo in a patient. (See, e.g., Cohen, J., 1993, which describes similar uses of “naked DNA”). For example, “naked DNA” associated with regulatory sequences may be administered therapeutically or as part of the vaccine composition e.g., by injection.

[0281] Alternatively, a nucleic acid encoding the antigens or peptides of the invention or a nucleic acid complementary thereto may be used within a pharmaceutical composition, e.g. in order to express the antigens or peptides or polypeptides of the invention in vivo, e.g., to induce antibodies.

[0282] A preferred embodiment of the invention relates to a pharmaceutical composition, wherein the nucleic acid according to the invention is comprised in a vector and/or a cell. Vectors and cells suitable in the context of the present invention are described above. Vectors are particularly employed for a DNA vaccine. An appropriate vector for delivery may be readily selected by one of skill in the art. Exemplary vectors for in vivo gene delivery are readily available from a variety of academic and commercial sources, and include, e.g., adeno-associated virus (International patent application No. PCT/US91/03440), adenovirus vectors (Kay, M. et al., 1994; Ishibashi, S. et al., 1993), or other viral vectors, e.g., various poxviruses, vaccinia, etc. Recombinant viral vectors, such as retroviruses or adenoviruses, are preferred for integrating the exogenous DNA into the chromosome of the cell.

[0283] The pharmaceutical compositions of the present invention may be administered in any effective, convenient manner including, for instance, administration by topical, oral, anal, vaginal, intravenous, intraperitoneal, intramuscular, subcutaneous, intranasal, intratracheal or intradermal routes among others.

[0284] In therapy or as a prophylactic, the active agent of the pharmaceutical composition of the present invention may be administered to an individual as an injectable composition, for example as a sterile aqueous dispersion, which is preferably isotonic.

[0285] Preferably, the pharmaceutical composition of the present invention may be administered intranasally, e.g. as an aerosol formulation.

[0286] In general, intranasal vaccination represents an attractive non-invasive alternative to needle-based injection and provides superior protection at mucosal surfaces. Furthermore, mucosal as well as systemic immunity can be induced after intranasal immunizations.

[0287] Therefore, intranasal application is particularly suited for Mcat vaccines according to the present invention.

[0288] Alternatively the composition, preferably the pharmaceutical composition may be formulated for topical application, for example in the form of ointments, creams, lotions, eye ointments, eye drops, ear drops, mouthwash, impregnated dressings and sutures and aerosols, and may contain appropriate conventional additives, including, for example, preservatives, solvents to assist drug penetration, and emollients in ointments and creams. Such topical formulations may also contain compatible conventional carriers, for example cream or ointment bases, and ethanol or oleyl alcohol for lotions. Such carriers may constitute from about 1% to about 98% by weight of the formulation; more usually they will constitute up to about 80% by weight of the formulation.

[0289] In addition to the therapy described above, the compositions of this invention may be used generally as a wound treatment agent to prevent adhesion of bacteria to matrix proteins exposed in wound tissue and for prophylactic use in dental treatment as an alternative to, or in conjunction with, antibiotic prophylaxis.

[0290] In a preferred embodiment the pharmaceutical composition is a vaccine composition. Preferably, such vaccine composition is conveniently in injectable form or in an aerosol formulation for intranasal delivery. Conventional adjuvants may be employed to enhance the immune response. A suitable unit dose for vaccination with a protein antigen is for adults between 0.02 to 3 μg antigen/per kg of body weight and for children between 0.2 to 10 μg antigen/per kg body weight, and such dose is preferably administered 1-3 times and with an interval of 2 to 24 weeks.

[0291] An “effective amount” or “therapeutically effective amount” of an antigen, nucleic acid, vector, an antibody or a pharmaceutical composition of the invention may be calculated as that amount capable of exhibiting an in vivo effect, e.g. preventing or ameliorating a sign or symptom of infection with Mcat. Such amounts may be determined by one of skill in the art.

[0292] With the indicated dose range, no adverse toxicological effects are expected with the compounds of the invention, which would preclude their administration to suitable individuals.

[0293] In a further embodiment the present invention relates to diagnostic and pharmaceutical packs and kits comprising one or more containers filled with one or more of the ingredients of the aforementioned compositions of the invention. The ingredient(s) can be present in a useful amount, dosage, formulation or combination. Associated with such container(s) can be a notice in the form prescribed by a governmental agency regulating the preparation, use or sale of pharmaceuticals or biological products, reflecting approval by the agency of the preparation, use or sale of the product for human administration.

[0294] In connection with the present invention any disease related use as disclosed herein such as, e.g., use of the pharmaceutical composition or vaccine, is particularly a disease or diseased condition which is caused by, linked or associated with Mcat. A disease related, caused, or associated with the bacterial infection to be prevented and/or treated according to the present invention includes chronic infections. Common sites include the upper and lower respiratory tract. The spectrum of clinical syndromes includes recurrent or chronic otitis media, pneumonia, upper respiratory tract disease, bronchitis, sinusitis, asthmatic bronchitis, adult-onset asthma, and chronic obstructive pulmonary disease.

[0295] It is within the present invention that each and any of the symptoms, diseases, disorders or syndromes described herein which are either directly or indirectly linked to or arise from a contact of an organism such as any animal or human with an Mcat species, preferably a pathogenic Mcat species are separately and independently indications, diseases or disorders in the meaning of the present invention. Accordingly and just by means of illustration, a disease in the sense of the present application is pneumonia as well as bronchitis and chronic obstructive pulmonary disease.

[0296] It is within the present invention that the disease for which the various compounds described herein can be used are also those diseases where the polypeptide according to the present invention is expressed or any disease where the compounds described herein such as the polypeptides according to the present invention, the vaccine, the antibody, and any aptamer and spiegelmer, respectively, are suitable for the treatment and/or diagnosis thereof. Such potential use can arise from cross-reactivity and homology, respectively. It understood by the one skilled in the art that any disease described in connection with the pharmaceutical composition according to the present invention can be subject to the use of the pharmaceutical composition described herein, and vice versa.

[0297] Treatment in the context of the present invention refers to both therapeutic treatment and prophylactic or preventative measures, wherein the object is to prevent or slow down (lessen) the targeted pathologic condition or disorder. Those in need of treatment include those already with the disorder as well as those prone to have the disorder or those in whom the disorder is to be prevented.

[0298] In a still further embodiment the present invention is related to a screening method using any of the polypeptides according to the present invention or any of the nucleic acids according to the present invention. Screening methods as such are known to the one skilled in the art and can be designed such that an agonist or an antagonist is screened. In connection with such screening method preferably an antagonist is screened which in the present case inhibits or prevents the binding of any antigen and fragment thereof according to the present invention to an interaction partner. Such interaction partner can be a naturally occurring interaction partner or a non-naturally occurring interaction partner.

[0299] The invention also provides a method for screening compounds to identify those which enhance (agonist) or block (antagonist) the function of the polypeptides according to the present invention or of the nucleic acid molecules of the present invention, such as its interaction with a binding molecule. The method of screening may involve high-throughput.

[0300] For example, to screen for agonists or antagonists, the interaction partner of the polypeptide according to the present invention, maybe a synthetic reaction mix, a cellular compartment, such as a membrane, cell envelope or cell wall, or a preparation of any thereof, may be prepared from a cell that expresses a molecule that binds to the polypeptides according to the present invention. The preparation is incubated with labelled forms of such polypeptides in the absence or the presence of a candidate molecule, which may be an agonist or antagonist. The ability of the candidate molecule to bind the binding molecule is reflected in decreased binding of the labelled ligand. Molecules which bind gratuitously, i.e., without inducing the functional effects of said polypeptides, are most likely to be good antagonists. Molecules that bind well and elicit functional effects that are the same as or closely related to the polypeptides according to the present invention are good agonists.

[0301] The functional effects of potential agonists and antagonists may be measured, for instance, by determining the activity of a reporter system following interaction of the candidate molecule with a cell or appropriate cell preparation, and comparing the effect with that of polypeptides according to the present invention or molecules that elicit the same effects as said polypeptides. Reporter systems that may be useful in this regard include but are not limited to colorimetric labelled substrate converted into product, a reporter gene that is responsive to changes in the functional activity of the polypeptides according to the present invention, and binding assays known in the art.

[0302] Another example of an assay for antagonists is a competitive assay that combines the polypeptides according to the present invention and a potential antagonist with membrane-bound binding molecules, recombinant binding molecules, natural substrates or ligands, or substrate or ligand mimetics, under appropriate conditions for a competitive inhibition assay. The polypeptides according to the present invention can be labelled such as by radioactivity or a colorimetric compound, such that the molecule number of polypeptides according to the present invention bound to a binding molecule or converted to product can be determined accurately to assess the effectiveness of the potential antagonist.

[0303] Potential antagonists include small organic molecules, peptides, polypeptides and antibodies that bind to polypeptides according to the present invention and thereby inhibit or extinguish its activity. Potential antagonists may also be small organic molecules, peptides, polypeptides such as a closely related proteins or antibodies that bind to the same sites on a binding molecule without inducing functional activity of the polypeptides according to the present invention.

[0304] Potential antagonists include a small molecule, which binds to and occupies the binding site of the polypeptides according to the present invention thereby preventing binding to cellular binding molecules, such that normal biological activity is prevented. Examples of small molecules include but are not limited to small organic molecules, peptides or peptide-like molecules.

[0305] Other potential antagonists include antisense molecules (see Okano, H. et al., 1991; OLIGODEOXYNUCLEOTIDES AS ANTISENSE INHIBITORS OF GENE EXPRESSION; CRC Press, Boca Raton, Fla. (1988), for a description of these molecules).

[0306] Preferred potential antagonists include derivatives of the antigens and fragments thereof of the invention.

[0307] As used herein the activity of a polypeptide according to the present invention is its capability to bind to any of its interaction partner or the extent of such capability to bind to its or any interaction partner.

[0308] In a particular aspect, the invention provides the use of the polypeptides according to the present invention antigens and fragments thereof, nucleic acid molecules or inhibitors of the invention to interfere with the initial physical interaction between a pathogen and mammalian host responsible for sequelae of infection. In particular the molecules of the invention may be used: i) in the prevention of adhesion of the Mcat species as disclosed herein, and more preferably the pathogenic species thereof to mammalian extracellular matrix proteins; ii) to block bacterial adhesion between mammalian extracellular matrix proteins and bacterial proteins which mediate tissue reaction; iii) or lead to evasion of immune defence; iv) to block the normal progression of pathogenesis in infections initiated other than by the implantation of in-dwelling devices or by other surgical techniques, e.g. through inhibiting nutrient acquisition.

[0309] Each of the DNA coding sequences provided herein may be used in the discovery, development and/or preparation of antibacterial compounds. The encoded protein upon expression can be used as a target for the screening of antibacterial drugs. Additionally, the DNA sequences encoding the amino terminal regions of the encoded protein or Shine-Delgarno or other translation facilitating sequences of the respective mRNA can be used to construct antisense sequences to control the expression of the coding sequence of interest.

[0310] The antagonists and agonists may be employed, for instance, to inhibit diseases arising from infection with Mcat.

[0311] In a still further aspect the present invention is related to an affinity device. Such affinity device comprises as least a support material and any of the polypeptides according to the present invention, which is attached to the support material. Because of the specificity of said polypeptides for their target cells or target molecules or their interaction partners, said polypeptides allow a selective removal of their interaction partner(s) from any kind of sample applied to the support material provided that the conditions for binding are met. The sample may be a biological or medical sample, including but not limited to, fermentation broth, cell debris, cell preparation, tissue preparation, organ preparation, blood, urine, lymph liquid, liquor and the like.

[0312] The polypeptides according to the present invention may be attached to the matrix in a covalent or non-covalent manner. Suitable support material is known to the one skilled in the art and can be selected from the group consisting of cellulose, silicon, glass, aluminum, paramagnetic beads, starch and dextrane.

[0313] The present invention is further illustrated by the following Figures, Tables, Examples and the Sequence Listing, from which further features, embodiments and advantages may be taken. It is to be understood that the present examples are given by way of illustration only and not by way of limitation of the disclosure.

[0314] In connection with the present invention

[0315] FIG. 1 shows the characterization of human sera as sources of pathogen specific antibodies.

[0316] FIG. 2 shows the characterization of the libraries.

[0317] FIG. 3 shows the PCR analysis to determine the conservation of identified open reading frames encoding antigenic Mcat proteins.

[0318] FIG. 4 shows median bacterial colony numbers (cfu) recovered in broncho-alveolar lavage (BAL) and lung tissue of animals immunized with the candidate antigens or controls (OmpCD or whole killed cells) by systemic (subcutaneous) immunization in the presence of incomplete Freund's adjuvant (IFA); the recovered CFU is expressed as percentage of CFU recovered from animals immunized with the adjuvant vehicle (IFA).

[0319] FIG. 5 shows median bacterial colony numbers (cfu) recovered from lung tissue of animals immunized with the candidate antigens, adjuvant without the proteins or the buffer alone, via mucosal (intranasal) route in the presence of Intercell's IC31® adjuvant.

[0320] FIG. 6 shows bacterial colony numbers (cfu) recovered in nasopharyngeal lavage (NAL) from animals immunized with the candidate antigens or controls (adjuvant and buffer) via mucosal (intranasal) route in the presence of Intercell's IC31® adjuvant.

[0321] Table 1 shows the results of the screenings of the 250 and 50/2 Moraxella catarrhalis libraries with the 4 pools of biotinylated human IgGs (P36, P37, P39 and IC20).

[0322] Table 2 shows the reactivity of randomly selected bacterial clones from screenings with biotinylated human IgG in Western blotting.

[0323] Table 3 shows an example of validating antigenic Mcat proteins identified by screening bacterial display libraries using peptide ELISA.

[0324] Table 4 shows the 214 immunogenic Mcat ORFs identified by screening bacterial display libraries of the fragmented genome of Meat RH4 with human immunoglobulin.

[0325] Table 5 shows a list of the 47 Mcat isolates used to examine the conservation of the 214 immunogenic Mcat ORFs identified by screening bacterial display libraries of the fragmented genome of Meat RH4 with human immunoglobulin.

[0326] Table 6 shows the conservation in 47 Mcat isolates of the 214 immunogenic Mcat ORFs identified by screening bacterial display libraries of the fragmented genome of Mcat RH4 with human immunoglobulin.

[0327] Table 7 shows the PCR primer sequences used for the analysis of the conservation in 47 Mcat isolates of the 214 immunogenic Mcat ORFs identified by screening bacterial display libraries of the fragmented genome of Meat RH4 with human immunoglobulin.

[0328] Table 8 shows the list of genes from M. catarrhalis strain RH4 selected for expression and further animal studies.

[0329] Table 9 shows the list of selected M. catarrhalis strain RH4 antigens and their corresponding immunization doses.

[0330] Table 10 shows the summary of sterile cultures identified per each animal experimental group.

[0331] The Figures and Tables to which it might be referred to in the specification are described in the following in more details.

[0332] FIG. 1. Characterization of Human Sera for Anti-Mcat Antibodies by Immunoblotting.

[0333] Lysates of Moraxella catarrhalis RH4 were separated on 4-20% gradient SDS-PAGE gels, transferred to nitrocellulose membranes and immunoblotted with human sera diluted 1:1,000. Molecular weight markers are indicated on the left.

[0334] Horizontal black bars indicate paired serum samples obtained from otitis media patients at the onset of disease (left under horizontal bar), and in the convalescent phase approximately 2 weeks later (right under horizontal bar). The figure indicates the reactivity of 10 such paired samples, i.e. 20 individual serum samples (left panel).

[0335] In addition, the figure shows the reactivity of 17 single serum samples, comprising 5 sera from asthma patients (P3918-P3965), 8 sera from healthy individuals (IC58B-IC54A) and 4 sera from the patients with respiratory allergies (P3845-P3867).

[0336] FIG. 2. Characterization of the Bacterial Display Libraries of the Fragmented Genome of Moraxella catarrhalis (Mcat) RH4.

### A,B, Mcat 50/2 Library (LamB Display Scaffold)

[0337] A, The DNA sequences of the displayed fragments were determined for 226 bacterial library clones. Following trimming for vector sequence, the displayed sequences exhibited a size distribution from approximately 25 to 150 bp, with an average size of 87 bp.

[0338] B, The 226 bacterial library clone sequences were matched to the complete genome sequence of the library Mcat strain RH4 (sequenced by Intercell AG (Vienna, Austria)). The displayed fragments were distributed equally along the complete Mcat genome, which is 1,863,286 bp. The numbering in the diagram refers to the project-internal numbering with by 1 corresponding to by 315261 in the reverse complemented and slightly corrected and repositioned sequence published with the GenBank accession number CP002005.1 (gi:295919923).

[0339] The 50/2 library comprised 860,000 colony-forming units, giving a calculated coverage of the Mcat genome of 40-fold.

### C,D, Mcat 250 Library (FhuA Display Scaffold)

[0340] C, The DNA sequences of the displayed fragments were determined for 320 bacterial library clones. Following trimming for vector sequence, the displayed sequences exhibited a size distribution from approximately 50 to 350 bp, with an average size of 199 bp.

[0341] D, The 320 bacterial library clone sequences were matched to the complete genome sequence of the library Mcat strain RH4 (sequenced by Intercell AG (Vienna, Austria)). The displayed fragments were distributed equally along the complete Mcat genome, which is 1,863,286 bp. The numbering in the diagram refers to the project-internal numbering with by 1 corresponding to by 315261 in the reverse complemented and slightly corrected and repositioned sequence published with the GenBank accession number CP002005.1 (gi:295919923).

[0342] The 250 library comprised 913,500 colony-forming units, giving a calculated coverage of the Mcat genome of 98-fold.

[0343] FIG. 3. Conservation of Identified Open Reading Frames Encoding Antigenic Moraxella catarrhalis (Mcat) Proteins.

[0344] A, an example of the PCR analysis of gene conservation for two Mcat open reading frames encoding antigenic proteins.

[0345] Genomic Mcat DNA was used as template for the PCR, at a dilution of 1:50. Negative control consisted of PCR on water. Two microliters of each PCR reaction was loaded on a 1% agarose gel. Top panel, gene MCRH3709. Bottom panel, gene MCRH3844. Expected position of PCR products is indicated by arrowheads (MCRH3709, 1,534 bp; MCRH3844, 974 bp). Numbers in lanes indicate Mcat strains (Table 5, internal Intercell reference number A). “−” indicates PCR on water. “+” indicates PCR on the Mcat library strain RH4.

[0346] B, C, summary of the PCR analysis of the conservation in 47 Mcat isolates of all 214 identified ORFs encoding antigenic proteins. For each ORF encoding antigenic Mcat proteins, the level of conservation was calculated as 100× (number of PCR positive Mcat isolates/47). B, The number of Mcat ORFs is expressed as a function of the level of conservation. C, The cumulative percent of Mcat ORFs is expressed as a function of the level of conservation.

[0347] FIG. 4. Lung Elimination of the Bacteria in the Mice Immunized by a Systemic Route (Intraperitoneal) with Control or Moraxella catarrhalis Vaccine Candidate Antigens after Challenge with Moraxella catarrhalis Strain RH4.

[0348] A, Bacterial clearance from the bronchoalveolar space expressed as a percentage of recovered bacteria (median CFU) from antigen-immunized mice compared to the median bacterial CFU recovered from the mice immunized with adjuvant vehicle control (IFA).

[0349] B, Percentage of recovered bacteria from the lung tissue homogenate expressed in reference to the adjuvant control (IFA).

[0350] C, Percentage of recovered bacteria from both, bronchoalveolar space and lung tissue homogenate combined. Abbreviations: WKC, whole killed cells; IFA, adjuvanted phosphate buffered saline without proteins added; OmpCD, outer membrane protein CD (used as a benchmark).

[0351] FIG. 5. Bacteria Recovered in the Lungs of the Mice Immunized Via Mucosal Route (Intranasal) with Control or M. catarrhalis Vaccine Candidate Antigens after Challenge with M. catarrhalis Strain RH4.

[0352] The data represents the mean values of the combined, normalized results from 2-5 independent experiments. Error bars represent the standard error of the mean (for N see Table 10). Figure showing data with (A) and without (B) sterile lung cultures.

[0353] Abbreviations: IC31®, mucosal adjuvant without proteins added; PBS, phosphate buffered saline without adjuvant added.

[0354] FIG. 6. Bacteria Recovered in Nasopharyngeal Lavage (NAL) of the Mice Immunized Via Mucosal Route (Intranasal) with Control or M. catarrhalis Vaccine Candidate Antigens after Challenge with M. catarrhalis Strain RH4.

[0355] The data represents the mean values of the combined, normalized results from 2-5 independent experiments. Error bars represent the standard error of the mean (for N see Table 10). Figure showing data with (A) and without (B) sterile NAL cultures.

[0356] Abbreviations: IC31®, mucosal adjuvant without proteins added; PBS, phosphate buffered saline without adjuvant added.

TABLE 1
Screening of Moraxella catarrhalis 250 and 50/2 libraries with the 4 pools of
biotinylated human IgGs (IC20, P36, P37, IC20 and P39). As negative control, no IgG
was added to the libraries before magnetic sorting (MACS). Number of library E. coli used
as input and eluted from the MACS columns are shown for all screens.

| | | | Cfu (Input) | | Cfu (Eluate) | | |
|---|---|---|---|---|---|---|---|
| | ^{b}Mcat | | Without | | Without | 20 μg | ^{c}Specific |
| ^{a}Screen | library | IgG pool | IgG | 20 μg IgG | IgG | IgG | enrichment |
| MCF-IC20 | 250 | IC20 | 1,800,000 | 1,100,000 | 240 | 4,440 | 30 |
| MCF-P36 | 250 | P36 | 2,100,000 | 800,000 | 40 | 4,920 | 323 |
| MCF-P37 | 250 | P37 | 4,500,000 | 4,300,000 | 6,800 | 40,000 | 6 |
| MCF-IC20a | 250 | IC20* | 300,000 | 200,000 | 400 | 6,720 | 25 |
| MCF-P39 | 250 | P39** | 400,000 | 1,300,000 | 1,200 | 4,280 | 1.1 |
| MCL2-IC20a | 50/2 | IC20* | 17,400,000 | 16,800,000 | 572 | 6,280 | 11 |
| MCL2-P36 | 50/2 | P36 | 17,400,000 | 8,700,000 | 572 | 10,920 | 38 |
| MCL2-P37 | 50/2 | P37 | 17,600,000 | 25,800,000 | 1,424 | 4,904 | 2 |
| MCL2-P39 | 50/2 | P39** | 17,600,000 | 16,600,000 | 1,424 | 3,640 | 3 |

*IgG pool preadsorbed against 4 Hag clones and 3 UspA2H clones
**IgG pool preadsorbed against 6 Hag clones and 3 UspA2H clones
^{a}Screen identifier.
^{b}250, FhuA display library. 50/2, LamB library.
^{c}Calculated as: (cfu eluate 20 μg IgG/cfu input 20 μg IgG)/(cfu eluate without IgG/cfu input without IgG). Specific enrichment of above 1 indicates that screening with human IgG bound more library clones than negative-control screening without human IgG, i.e., that the clones bound with human IgG were enriched for display of antigenic Mcat sequences.

TABLE 2
Table 2. Reactivity of randomly selected bacterial library clones
from screenings with biotinylated human IgG in Western blotting.

| | Number of | Number of | Percent of the |
|---|---|---|---|
| | bacterial library | bacterial | bacterial |
| | clones tested | clones positive | clones positive |
| ^{a}Screen | by Western | by Western | by Western |
| MCF-IC20 | 182 | 146 | 80 |
| MCF-P36 | 142 | 80 | 56 |
| MCF-P37 | 149 | 101 | 68 |
| MCF-IC20a | 130 | 74 | 57 |
| MCF-P39 | 79 | 53 | 67 |
| MCL2-IC20a | 48 | 23 | 48 |
| MCL2-P36 | 72 | 30 | 42 |
| MCL2-P37 | 96 | 55 | 57 |
| MCL2-P39 | 68 | 18 | 26 |

The same serum pools were used for MACS and Western.
^{a}Screening identifier; a total of 9 screens were done, corresponding to Table 1.

TABLE 3
Reactivity of overlapping peptides representing 3 antigenic Mcat proteins in ELISA.
Overlapping peptide sets were synthesized for identified antigenic Mcat ORFs, and human sera
were tested for anti-Mcat peptide reactivity by ELISA.

| | Seroconversion (OM patients) | | | | | | Asthmatic patients | | | | |
|---|---|---|---|---|---|---|---|---|---|---|---|
| Peptide | P4060 | P4070 | P4072 | P4101 | P4115 | P4120 | P3918 | P3923 | P3941 | P3943 | P3965 |
| MCRH1546.01 | 4.59 | 0.79 | 1.62 | 0.57 | 1.00 | 0.69 | 0 | 0 | 0 | 0 | 0 |
| MCRH1546.02 | 6.53 | 0.85 | 1.32 | 1.00 | 1.00 | 1.00 | 0 | 0 | 0 | 228 | 0 |
| MCRH1565.01 | 1.00 | 1.00 | 1.00 | 1.00 | 1.00 | 1.00 | 0 | 0 | 0 | 0 | 0 |
| MCRH1565.02 | 0.58 | 0.90 | 1.00 | 0.83 | 1.00 | 0.81 | 238 | 298 | 207 | 167 | 244 |
| MCRH1565.03 | 1.00 | 1.00 | 1.00 | 0.94 | 0.67 | 0.60 | 147 | 212 | 122 | 141 | 0 |
| MCRH1565.04 | 1.00 | 1.00 | 1.00 | 0.87 | 1.00 | 1.00 | 0 | 0 | 0 | 0 | 0 |
| MCRH1586.01 | 1.00 | 1.00 | 1.00 | 1.00 | 1.00 | 1.00 | 0 | 0 | 0 | 0 | 0 |
| MCRH1586.02 | 0.70 | 1.00 | 1.00 | 1.12 | 1.00 | 1.00 | 149 | 0 | 221 | 0 | 0 |
| MCRH1586.03 | 0.85 | 1.05 | 0.92 | 0.94 | 0.75 | 0.75 | 391 | 428 | 424 | 381 | 427 |
| MCRH1586.04 | 0.87 | 1.00 | 1.00 | 3.25 | 1.08 | 1.00 | 0 | 0 | 0 | 748 | 0 |
| MCRH1586.05 | 0.92 | 1.00 | 0.78 | 1.09 | 0.78 | 0.68 | 428 | 426 | 391 | 399 | 109 |

| | Healthy individuals | | | | | FINAL |
|---|---|---|---|---|---|---|
| Peptide | IC58B | IC85B | IC86B | IC89B | IC54A | SCORE |
| MCRH1546.01 | 0 | 0 | 0 | 0 | 0 | 6 |
| MCRH1546.02 | 0 | 312 | 0 | 0 | 0 | 8 |
| MCRH1565.01 | 0 | 0 | 0 | 0 | 0 | 0 |
| MCRH1565.02 | 0 | 0 | 0 | 0 | 399 | 4 |
| MCRH1565.03 | 0 | 0 | 0 | 0 | 186 | 1 |
| MCRH1565.04 | 0 | 0 | 0 | 0 | 0 | 0 |
| MCRH1586.01 | 0 | 0 | 0 | 0 | 0 | 0 |
| MCRH1586.02 | 0 | 100 | 0 | 0 | 136 | 1 |
| MCRH1586.03 | 253 | 311 | 0 | 356 | 552 | 10 |
| MCRH1586.04 | 0 | 0 | 0 | 0 | 0 | 8 |
| MCRH1586.05 | 195 | 416 | 0 | 208 | 560 | 8 |

“Seroconversion (OM patients)”: paired serum samples were examined from the same otitis media patient, at the onset of disease, and in the convalescent phase, approximately 2 weeks later. The seroconversion values were calculated as the ratio between the ELISA reactivity of convalescent to acute serum samples. High seroconversion values indicate high anti-Mcat antibody levels in the convalescent sera.
“Asthmatic patients”: asthma patients, single serum samples, including recurrent otitis media patient P3965 single serum sample.
“Healthy individuals”: healthy individuals, single serum samples. For the “Asthmatic patients/recurrent OM” and “Healthy individuals” serum samples, ELISA reactivity values were calculated as 1,000 × [(OD405 wells with serum added) − (OD405 wells with secondary antibody alone)]. ELISA reactivity values below 100 were considered negative. High ELISA reactivity values indicate high anti-Mcat antibody levels in the sera.
“Final score”: The immunoreactivity of individual synthetic peptides representing selected epitopes with human sera. 22 sera were tested in all, comprising 6 serum pairs, and 10 unpaired sera, as shown in the table.
Seroconversion (6 serum pairs) was assigned the following score values: >3 fold, 3 points. From 1.9 to 3-fold, 2 points. From 1.5 to 1.9-fold 1 point. ELISA reactivity (recurrent, asthma and healthy individual sera) was assigned the following score values: >500 ELISA units, 3 points. 250-499 ELISA units, 2 points. 150-249 ELISA units, 1 points. For peptides where seroconversion was not seen with any of the 6 paired serum samples, the ELISA reactivities were reduced by 50%. For each peptide, the final ranking score was calculated as the sum of seroconversion and ELISA reactivity scores for all 22 human sera.

TABLE 4
Immunogenic Mcat proteins identified by bacterial surface display.

| | | | | | ^{e}Location | | |
|---|---|---|---|---|---|---|---|
| | | | ^{c}Predicted | ^{d}N^{o} of | of | | |
| ^{a}Moraxella | | | classII- | selected | identified | | |
| catarrhalis | ^{a}Putative | ^{b}Predicted | restricted T | clones | immunogenic | | |
| RH4 antigenic | function (by | immunogenic | cell epitope | per | region | ^{f}SEQ ID NO | ^{f}SEQ ID NO |
| protein | homology) | aa | regions | ORF | (aa) | (DNA) | (Protein) |
| MCRH0005 | Putative | 4-10, 12-40, | 9-99, 108-128, | 1 | 17-72 | 1 | 215 |
| | uncharacterized | 46-52, 61-76, | 132-169, | | | | |
| | protein - | 78-94, | 179-286 | | | | |
| | Psychrobacters | 96-103, | | | | | |
| | (strain | 107-114, | | | | | |
| | PRwf-1) | 126-133, | | | | | |
| | | 135-150, | | | | | |
| | | 153-162, | | | | | |
| | | 167-174, | | | | | |
| | | 182-195, | | | | | |
| | | 199-208, | | | | | |
| | | 210-218, | | | | | |
| | | 226-244, | | | | | |
| | | 247-255, | | | | | |
| | | 262-276, | | | | | |
| | | 285-292 | | | | | |
| MCRH0052 | S. UDP-N- | 7-17, 25-32, | 1-168, 180-204, | 4 | 10-60, 92-130, | 2 | 216 |
| | acetylmuramate-- | 36-53, 66-76, | 212-253, | | 207-280 | | |
| | L-alanine | 83-91, | 261-313, | | | | |
| | ligase (EC | 100-113, | 326-467, | | | | |
| | 6.3.2.8) | 124-131, | 472-486 | | | | |
| | (UDP-N | 151-158, | | | | | |
| | acetylmuramoyl- | 168-179, | | | | | |
| | L-alanine | 184-198, | | | | | |
| | synthetase) - | 213-225, | | | | | |
| | Psychrobacter | 227-237, | | | | | |
| | arcticum | 247-256, | | | | | |
| | | 261-270, | | | | | |
| | | 275-281, | | | | | |
| | | 284-293, | | | | | |
| | | 295-305, | | | | | |
| | | 315-329, | | | | | |
| | | 345-358, | | | | | |
| | | 388-415, | | | | | |
| | | 436-443, | | | | | |
| | | 449-456, | | | | | |
| | | 471-483 | | | | | |
| MCRH0079 | SSU | 45-53, 58-65, | 18-158, | 2 | 211-260 | 3 | 217 |
| | ribosomal | 70-78, | 163-232 | | | | |
| | protein S2P - | 81-87, 94-100, | | | | | |
| | Psychrobacter | 163-179, | | | | | |
| | cryohalolentis | 184-192, | | | | | |
| | (strain K5) | 201-207, | | | | | |
| | | 212-222, | | | | | |
| | | 224-230, | | | | | |
| | | 254-260, | | | | | |
| | | 263-268 | | | | | |
| MCRH0082 | SMC protein | 4-12, 25-33, | 1-80, 88-153, | 9 | 128-158, | 4 | 218 |
| | (Fragment) - | 40-50, 62-69, | 167-222, | | 161-232, | | |
| | Terfezia | 74-85, | 231-249, | | 277-314, | | |
| | boudieri | 97-109, | 256-289, | | 590-627, | | |
| | | 127-138, | 304-337, | | 712-848, | | |
| | | 141-149, | 340-488, | | 957-963, | | |
| | | 153-161, | 491-679, | | 1007-1033, | | |
| | | 197-203, | 681-780, | | 1074-1093 | | |
| | | 206-215, | 803-878, | | | | |
| | | 217-223, | 880-942, | | | | |
| | | 258-265, | 951-986, | | | | |
| | | 272-286, | 988-1014, | | | | |
| | | 308-316, | 1030-1106, | | | | |
| | | 325-335, | 1109-1133, | | | | |
| | | 343-358, | 1136-1179, | | | | |
| | | 366-371, | 1183-1203 | | | | |
| | | 373-381, | | | | | |
| | | 400-406, | | | | | |
| | | 417-426, | | | | | |
| | | 444-458, | | | | | |
| | | 466-486, | | | | | |
| | | 498-514, | | | | | |
| | | 522-539, | | | | | |
| | | 544-555, | | | | | |
| | | 561-572, | | | | | |
| | | 603-619, | | | | | |
| | | 621-638, | | | | | |
| | | 658-672, | | | | | |
| | | 687-695, | | | | | |
| | | 710-723, | | | | | |
| | | 731-744, | | | | | |
| | | 747-752, | | | | | |
| | | 764-769, | | | | | |
| | | 789-805, | | | | | |
| | | 808-823, | | | | | |
| | | 830-840, | | | | | |
| | | 873-885, | | | | | |
| | | 888-900, | | | | | |
| | | 902-920, | | | | | |
| | | 930-943, | | | | | |
| | | 964-970, | | | | | |
| | | 992-1003, | | | | | |
| | | 1005-1016, | | | | | |
| | | 1033-1038, | | | | | |
| | | 1045-1057, | | | | | |
| | | 1059-1068, | | | | | |
| | | 1089-1096, | | | | | |
| | | 1104-1110, | | | | | |
| | | 1115-1142, | | | | | |
| | | 1150-1156, | | | | | |
| | | 1158-1169, | | | | | |
| | | 1188-1198, | | | | | |
| | | 1200-1205 | | | | | |
| MCRH0103 | C-terminal | 4-29, 45-56, | 1-33, 45-204, | 2 | 496-512, | 5 | 219 |
| | processing | 68-78, 84-97, | 210-414, | | 542-618 | | |
| | peptidase-1. | 100-109, | 431-480, | | | | |
| | Serine | 127-141, | 486-532, | | | | |
| | peptidase. | 145-151, | 536-582, | | | | |
| | MEROPS | 173-179, | 597-691, | | | | |
| | famil S41A - | 189-197, | 704-724 | | | | |
| | Psychrobacter | 202-209, | | | | | |
| | arcticum | 214-220, | | | | | |
| | | 238-263, | | | | | |
| | | 266-279, | | | | | |
| | | 288-297, | | | | | |
| | | 307-315, | | | | | |
| | | 330-336, | | | | | |
| | | 343-351, | | | | | |
| | | 358-367, | | | | | |
| | | 373-382, | | | | | |
| | | 388-403, | | | | | |
| | | 412-421, | | | | | |
| | | 423-429, | | | | | |
| | | 435-441, | | | | | |
| | | 449-459, | | | | | |
| | | 462-468, | | | | | |
| | | 488-501, | | | | | |
| | | 503-522, | | | | | |
| | | 536-542, | | | | | |
| | | 559-572, | | | | | |
| | | 603-611, | | | | | |
| | | 623-630, | | | | | |
| | | 675-681, | | | | | |
| | | 684-690, | | | | | |
| | | 705-719 | | | | | |
| MCRH0125 | S. DNA- | 14-24, 50-70, | 6-26, 35-55, | 42 | 199-293, | 6 | 220 |
| | directed RNA | 76-92, | 58-163, | | 420-438, | | |
| | polymerase | 100-128, | 166-184, | | 643-694, | | |
| | subunit beta′ | 130-143, | 190-252, | | 719-771, | | |
| | (EC 2.7.7.6) | 150-155, | 258-300, | | 823-881, | | |
| | (RNAP | 178-187, | 305-493, | | 1050-1144, | | |
| | subunit beta′) | 215-221, | 495-559, | | 1267-1339 | | |
| | (Transcriptase | 233-251, | 567-587, | | | | |
| | subunit | 261-267, | 591-654, | | | | |
| | beta′) (RNA | 275-288, | 672-750, | | | | |
| | polymerase | 295-301, | 753-813, | | | | |
| | subunit beta′) - | 319-324, | 827-866, | | | | |
| | Psychrobacters | 339-364, | 870-889, | | | | |
| | (strain | 368-384, | 898-983, | | | | |
| | PRwf-1) | 404-453, | 993-1011, | | | | |
| | | 461-472, | 1038-1107, | | | | |
| | | 493-510, | 1139-1162, | | | | |
| | | 522-532, | 1168-1191, | | | | |
| | | 534-550, | 1199-1256, | | | | |
| | | 570-577, | 1261-1355, | | | | |
| | | 598-633, | 1365-1387 | | | | |
| | | 641-655, | | | | | |
| | | 666-672, | | | | | |
| | | 676-682, | | | | | |
| | | 762-772, | | | | | |
| | | 793-808, | | | | | |
| | | 819-826, | | | | | |
| | | 836-858, | | | | | |
| | | 860-867, | | | | | |
| | | 872-896, | | | | | |
| | | 900-907, | | | | | |
| | | 909-918, | | | | | |
| | | 929-948, | | | | | |
| | | 961-974, | | | | | |
| | | 990-1003, | | | | | |
| | | 1005-1015, | | | | | |
| | | 1018-1025, | | | | | |
| | | 1066-1076, | | | | | |
| | | 1081-1090, | | | | | |
| | | 1100-1113, | | | | | |
| | | 1124-1131, | | | | | |
| | | 1146-1152, | | | | | |
| | | 1191-1197, | | | | | |
| | | 1202-1208, | | | | | |
| | | 1214-1231, | | | | | |
| | | 1237-1254, | | | | | |
| | | 1282-1310, | | | | | |
| | | 1313-1325, | | | | | |
| | | 1333-1353, | | | | | |
| | | 1365-1378 | | | | | |
| MCRH0139 | S. DNA- | 14-42, 50-65, | 1-74, 84-228, | 6 | 443-561, | 7 | 221 |
| | directed RNA | 69-81, | 233-258, | | 644-713, | | |
| | polymerase | 96-109, | 264-383, | | 767-806, | | |
| | subunit beta | 122-129, | 391-449, | | 990-996 | | |
| | (EC 2.7.7.6) | 146-161, | 451-490, | | | | |
| | (RNAP | 170-184, | 496-547, | | | | |
| | subunit beta) | 194-200, | 559-610, | | | | |
| | (Transcriptase | 206-215, | 616-635, | | | | |
| | subunit | 221-234, | 640-731, | | | | |
| | beta) (RNA | 241-248, | 752-778, | | | | |
| | polymerase | 264-270, | 799-862, | | | | |
| | subunit beta) - | 273-281, | 874-990, | | | | |
| | Psychrobacter | 288-299, | 1064-1110, | | | | |
| | arcticum | 303-316, | 1114-1138, | | | | |
| | | 320-338, | 1144-1167, | | | | |
| | | 345-352, | 1183-1203, | | | | |
| | | 365-372, | 1209-1230, | | | | |
| | | 426-443, | 1241-1281, | | | | |
| | | 475-484, | 1289-1363 | | | | |
| | | 499-515, | | | | | |
| | | 518-524, | | | | | |
| | | 537-546, | | | | | |
| | | 555-563, | | | | | |
| | | 565-572, | | | | | |
| | | 582-588, | | | | | |
| | | 601-608, | | | | | |
| | | 612-629, | | | | | |
| | | 642-647, | | | | | |
| | | 662-683, | | | | | |
| | | 698-703, | | | | | |
| | | 706-711, | | | | | |
| | | 718-731, | | | | | |
| | | 739-746, | | | | | |
| | | 758-766, | | | | | |
| | | 776-782, | | | | | |
| | | 801-807, | | | | | |
| | | 825-835, | | | | | |
| | | 840-852, | | | | | |
| | | 878-886, | | | | | |
| | | 889-897, | | | | | |
| | | 908-915, | | | | | |
| | | 920-933, | | | | | |
| | | 935-946, | | | | | |
| | | 972-979, | | | | | |
| | | 982-992, | | | | | |
| | | 1003-1008, | | | | | |
| | | 1013-1023, | | | | | |
| | | 1030-1042, | | | | | |
| | | 1065-1081, | | | | | |
| | | 1095-1103, | | | | | |
| | | 1116-1126, | | | | | |
| | | 1132-1138, | | | | | |
| | | 1155-1173, | | | | | |
| | | 1176-1184, | | | | | |
| | | 1186-1199, | | | | | |
| | | 1203-1209, | | | | | |
| | | 1216-1224, | | | | | |
| | | 1242-1262, | | | | | |
| | | 1270-1282, | | | | | |
| | | 1295-1306, | | | | | |
| | | 1308-1316, | | | | | |
| | | 1342-1348, | | | | | |
| | | 1352-1357 | | | | | |
| MCRH0176 | — | 4-19, 25-33, | 1-72, 74-108 | 1 | 55-108 | 8 | 222 |
| | | 36-51, 53-67, | | | | | |
| | | 105-110 | | | | | |
| MCRH0211 | S. Shikimate | 15-36, 42-96, | 3-115 | 1 | 4-23 | 9 | 223 |
| | dehydrogenase | 101-112 | | | | | |
| | (EC | | | | | | |
| | 1.1.1.25) - | | | | | | |
| | Psychrobacter | | | | | | |
| | cryohalolentis | | | | | | |
| | (strain K5) | | | | | | |
| MCRH0249 | Anthranilate | 4-10, 12-22, | 1-227, 248-378, | 4 | 310-399 | 10 | 224 |
| | synthase, | 25-32, 35-48, | 395-427, | | | | |
| | component I | 54-59, | 445-459 | | | | |
| | (EC 4.1.3.27) - | 65-70, 100-111, | | | | | |
| | Psychrobacter | 115-126, | | | | | |
| | cryohalolentis | 132-149, | | | | | |
| | (strain K5) | 156-164, | | | | | |
| | | 166-188, | | | | | |
| | | 197-207, | | | | | |
| | | 220-235, | | | | | |
| | | 243-265, | | | | | |
| | | 272-278, | | | | | |
| | | 309-318, | | | | | |
| | | 322-329, | | | | | |
| | | 340-353, | | | | | |
| | | 355-370, | | | | | |
| | | 378-388, | | | | | |
| | | 393-398, | | | | | |
| | | 410-417, | | | | | |
| | | 441-447, | | | | | |
| | | 449-455 | | | | | |
| MCRH0267 | Putative | 5-39 | 1-40 | 17 | 3-52 | 11 | 225 |
| | uncharacterized | | | | | | |
| | protein - | | | | | | |
| | Moraxella | | | | | | |
| | catarrhalis | | | | | | |
| MCRH0268 | Lactoferrin | 10-16, 20-40, | 1-48, 54-82, | 13 | 23-130, | 12 | 226 |
| | binding | 58-80, | 101-122, | | 227-257, | | |
| | protein A - | 83-89, 98-119, | 126-184, | | 269-346, | | |
| | Moraxella | 126-132, | 186-235, | | 680-775, | | |
| | catarrhalis | 138-149, | 237-325, | | 817-894, | | |
| | | 173-179, | 350-443, | | 922-983 | | |
| | | 193-210, | 448-512, | | | | |
| | | 229-235, | 523-545, | | | | |
| | | 242-248, | 553-583, | | | | |
| | | 266-272, | 595-623, | | | | |
| | | 293-301, | 634-657, | | | | |
| | | 303-315, | 660-729, | | | | |
| | | 335-350, | 732-786, | | | | |
| | | 355-362, | 804-841, | | | | |
| | | 368-377, | 845-975, | | | | |
| | | 379-390, | 980-1000 | | | | |
| | | 402-408, | | | | | |
| | | 420-431, | | | | | |
| | | 438-443, | | | | | |
| | | 451-464, | | | | | |
| | | 471-476, | | | | | |
| | | 486-501, | | | | | |
| | | 504-525, | | | | | |
| | | 547-568, | | | | | |
| | | 606-612, | | | | | |
| | | 637-644, | | | | | |
| | | 649-656, | | | | | |
| | | 685-701, | | | | | |
| | | 728-740, | | | | | |
| | | 774-780, | | | | | |
| | | 784-791, | | | | | |
| | | 793-800, | | | | | |
| | | 806-816, | | | | | |
| | | 818-834, | | | | | |
| | | 853-860, | | | | | |
| | | 878-888, | | | | | |
| | | 890-895, | | | | | |
| | | 926-937, | | | | | |
| | | 969-976, | | | | | |
| | | 983-997 | | | | | |
| MCRH0278 | Lactoferrin | 4-31, 34-55, | 4-51, 95-116, | 37 | 29-69, 204-337, | 13 | 227 |
| | binding | 98-105, | 125-207, | | 400-502, | | |
| | protein B - | 127-137, | 217-244, | | 578-765 | | |
| | Moraxella | 157-175, | 254-363, | | | | |
| | catarrhalis | 187-194, | 375-426, | | | | |
| | | 228-238, | 440-469, | | | | |
| | | 255-262, | 474-506, | | | | |
| | | 268-273, | 527-574, | | | | |
| | | 281-296, | 576-641, | | | | |
| | | 302-307, | 653-682, | | | | |
| | | 314-327, | 750-800, | | | | |
| | | 329-339, | 803-835 | | | | |
| | | 346-352, | | | | | |
| | | 394-401, | | | | | |
| | | 407-416, | | | | | |
| | | 452-458, | | | | | |
| | | 466-477, | | | | | |
| | | 534-550, | | | | | |
| | | 561-571, | | | | | |
| | | 573-580, | | | | | |
| | | 597-605, | | | | | |
| | | 610-622, | | | | | |
| | | 624-630, | | | | | |
| | | 639-644, | | | | | |
| | | 650-656, | | | | | |
| | | 666-672, | | | | | |
| | | 689-696, | | | | | |
| | | 706-712, | | | | | |
| | | 728-735, | | | | | |
| | | 743-748, | | | | | |
| | | 785-790, | | | | | |
| | | 803-812, | | | | | |
| | | 820-825, | | | | | |
| | | 827-833, | | | | | |
| | | 843-848, | | | | | |
| | | 861-868 | | | | | |
| MCRH0342 | Putative | 8-16, 19-52, | 6-56, 85-99, | 3 | 101-185 | 14 | 228 |
| | uncharacterized | 61-68, 77-86, | 106-127, | | | | |
| | protein - | 88-98, | 140-222 | | | | |
| | Psychrobacter | 106-116, | | | | | |
| | arcticum | 126-131, | | | | | |
| | | 143-153, | | | | | |
| | | 163-178, | | | | | |
| | | 183-191, | | | | | |
| | | 211-217 | | | | | |
| MCRH0357 | Lytic murein | 15-26, 46-53, | 1-108, 114-192, | 11 | 32-98, 122-144, | 15 | 229 |
| | transglycosylase | 59-68, | 208-285, | | 157-323, | | |
| | precursor - | 75-86, 93-104, | 310-348, | | 336-351, | | |
| | Psychrobacters | 116-122, | 375-483 | | 369-389, | | |
| | (strain | 126-140, | | | 433-440 | | |
| | PRwf-1) | 154-165, | | | | | |
| | | 175-181, | | | | | |
| | | 206-216, | | | | | |
| | | 230-243, | | | | | |
| | | 251-257, | | | | | |
| | | 294-301, | | | | | |
| | | 305-311, | | | | | |
| | | 324-336, | | | | | |
| | | 364-372, | | | | | |
| | | 374-381, | | | | | |
| | | 394-400, | | | | | |
| | | 419-427, | | | | | |
| | | 435-447, | | | | | |
| | | 451-459 | | | | | |
| MCRH0372 | Electron | 4-10, 12-23, | 1-41, 47-100 | 1 | 7-58 | 16 | 230 |
| | transfer | 27-40, 42-49, | | | | | |
| | flavoprotein- | 59-67, | | | | | |
| | ubiquinone | 94-99 | | | | | |
| | oxidoreductase | | | | | | |
| | (EC 1.5.5.1) - | | | | | | |
| | Psychrobacter | | | | | | |
| | arcticum | | | | | | |
| MCRH0391 | Putative | 4-22, 38-52, | 1-29, 33-61, | 4 | 24-38, 46-67, | 17 | 231 |
| | uncharacterized | 110-117, | 71-128, | | 128-177 | | |
| | protein - | 122-132, | 138-189 | | | | |
| | Psychrobacter | 144-154, | | | | | |
| | arcticum | 167-175 | | | | | |
| MCRH0397 | Ribose- | 4-9, 13-29, | 1-21, 42-140, | 3 | 135-227 | 18 | 232 |
| | phosphate | 39-45, 50-64, | 145-261, | | | | |
| | pyrophospho | 67-77, | 263-315 | | | | |
| | kinase (EC | 85-94, 103-120, | | | | | |
| | 2.7.6.1) - | 127-146, | | | | | |
| | Psychrobacters | 148-156, | | | | | |
| | (strain | 163-178, | | | | | |
| | PRwf-1) | 180-192, | | | | | |
| | | 204-211, | | | | | |
| | | 213-238, | | | | | |
| | | 241-256, | | | | | |
| | | 266-295 | | | | | |
| MCRH0432 | — | 4-15, 33-58, | 1-178 | 5 | 7-61 | 19 | 233 |
| | | 67-120, | | | | | |
| | | 129-139, | | | | | |
| | | 144-171 | | | | | |
| MCRH0441 | Excinuclease | 18-24, 26-34, | 1-43, 49-70, | 18 | 288-408, | 20 | 234 |
| | ABC subunit | 40-47, | 100-164, | | 577-608, | | |
| | A - | 53-70, 74-88, | 173-192, | | 622-764, | | |
| | Psychrobacter | 103-125, | 198-258, | | 826-899, | | |
| | arcticum | 128-137, | 265-306, | | 923-948 | | |
| | | 150-159, | 315-371, | | | | |
| | | 164-174, | 373-433, | | | | |
| | | 181-188, | 438-461, | | | | |
| | | 201-209, | 465-523, | | | | |
| | | 220-230, | 525-741, | | | | |
| | | 232-238, | 761-785, | | | | |
| | | 249-272, | 787-808, | | | | |
| | | 278-287, | 810-925, | | | | |
| | | 290-303, | 937-953 | | | | |
| | | 318-332, | | | | | |
| | | 346-353, | | | | | |
| | | 379-387, | | | | | |
| | | 394-419, | | | | | |
| | | 421-430, | | | | | |
| | | 433-441, | | | | | |
| | | 443-450, | | | | | |
| | | 470-488, | | | | | |
| | | 498-507, | | | | | |
| | | 509-524, | | | | | |
| | | 532-539, | | | | | |
| | | 543-550, | | | | | |
| | | 557-579, | | | | | |
| | | 602-608, | | | | | |
| | | 611-617, | | | | | |
| | | 624-632, | | | | | |
| | | 641-657, | | | | | |
| | | 671-676, | | | | | |
| | | 694-701, | | | | | |
| | | 720-730, | | | | | |
| | | 753-762, | | | | | |
| | | 764-785, | | | | | |
| | | 792-797, | | | | | |
| | | 801-807, | | | | | |
| | | 817-840, | | | | | |
| | | 853-859, | | | | | |
| | | 868-874, | | | | | |
| | | 878-894, | | | | | |
| | | 899-913, | | | | | |
| | | 915-921, | | | | | |
| | | 929-935 | | | | | |
| MCRH0448 | Nicotinate- | 10-23, 36-44, | 1-185, 190-234, | 1 | 182-251 | 21 | 235 |
| | nucleotide | 46-63, | 240-254 | | | | |
| | adenylyltransferase | 70-79, 89-106, | | | | | |
| | (EC | 118-128, | | | | | |
| | 2.7.7.18) - | 140-149, | | | | | |
| | Psychrobacter | 161-170, | | | | | |
| | arcticum | 197-207, | | | | | |
| | | 233-245 | | | | | |
| MCRH0464 | 8-amino-7- | 6-20, 26-32, | 1-399 | 5 | 303-363 | 22 | 236 |
| | oxononanoate | 41-47, 50-72, | | | | | |
| | synthase (EC | 75-83, | | | | | |
| | 2.3.1.47) - | 102-112, | | | | | |
| | Acinetobacters | 114-140, | | | | | |
| | (strain | 156-172, | | | | | |
| | ADP1) | 178-187, | | | | | |
| | | 197-218, | | | | | |
| | | 228-269, | | | | | |
| | | 275-297, | | | | | |
| | | 307-336, | | | | | |
| | | 352-368, | | | | | |
| | | 370-377, | | | | | |
| | | 387-397 | | | | | |
| MCRH0477 | Multi-sensor | 8-38, 40-46, | 1-76, 82-103, | 8 | 888-947 | 23 | 237 |
| | hybrid | 53-70, 88-94, | 105-156, | | | | |
| | histidine | 127-136, | 158-289, | | | | |
| | kinase | 140-145, | 295-474, | | | | |
| | precursor - | 154-174, | 506-557, | | | | |
| | Psychrobacters | 186-191, | 565-803, | | | | |
| | (strain | 198-226, | 806-857, | | | | |
| | PRwf-1) | 236-243, | 867-898, | | | | |
| | | 249-256, | 914-988 | | | | |
| | | 260-266, | | | | | |
| | | 269-280, | | | | | |
| | | 320-333, | | | | | |
| | | 342-349, | | | | | |
| | | 357-363, | | | | | |
| | | 365-381, | | | | | |
| | | 385-430, | | | | | |
| | | 433-449, | | | | | |
| | | 456-465, | | | | | |
| | | 467-475, | | | | | |
| | | 488-493, | | | | | |
| | | 498-503, | | | | | |
| | | 510-520, | | | | | |
| | | 557-609, | | | | | |
| | | 618-624, | | | | | |
| | | 631-644, | | | | | |
| | | 646-673, | | | | | |
| | | 679-685, | | | | | |
| | | 690-696, | | | | | |
| | | 698-734, | | | | | |
| | | 780-797, | | | | | |
| | | 802-808, | | | | | |
| | | 810-829, | | | | | |
| | | 831-870, | | | | | |
| | | 879-890, | | | | | |
| | | 910-916, | | | | | |
| | | 926-942, | | | | | |
| | | 944-980 | | | | | |
| MCRH0498 | Possible | 16-23, 25-33, | 10-182, | 5 | 140-160, | 24 | 238 |
| | ATP- | 41-53, | 212-232, | | 232-300, | | |
| | dependent | 56-63, 70-79, | 236-358, | | 321-394, | | |
| | DEAD/DEAH | 87-98, | 364-409, | | 514-522 | | |
| | box RNA- | 100-111, | 461-475, | | | | |
| | helicase - | 120-128, | 478-498, | | | | |
| | Psychrobacter | 131-149, | 542-577 | | | | |
| | arcticum | 160-171, | | | | | |
| | | 214-230, | | | | | |
| | | 232-242, | | | | | |
| | | 247-255, | | | | | |
| | | 259-266, | | | | | |
| | | 273-282, | | | | | |
| | | 284-292, | | | | | |
| | | 308-347, | | | | | |
| | | 355-364, | | | | | |
| | | 370-376, | | | | | |
| | | 379-386, | | | | | |
| | | 554-563 | | | | | |
| MCRH0512 | DNA- | 9-35, 39-51, | 8-241, 244-265, | 7 | 152-279 | 25 | 239 |
| | (Apurinic or | 54-67, 71-78, | 269-302 | | | | |
| | apyrimidinic | 93-102, | | | | | |
| | site)lyase/ | 105-116, | | | | | |
| | Formamidopyrimidine- | 122-129, | | | | | |
| | DN | 138-147, | | | | | |
| | glycosylase | 155-162, | | | | | |
| | (EC | 168-192, | | | | | |
| | 4.2.99.18) | 194-231, | | | | | |
| | (EC 3.2.2.23) - | 253-261, | | | | | |
| | Psychrobacter | 264-276, | | | | | |
| | cryohalolentis | 281-293 | | | | | |
| | (strain K5) | | | | | | |
| MCRH0525 | Phenylalanyl- | 35-56, 61-70, | 1-22, 36-70, | 6 | 115-232, | 26 | 240 |
| | tRNA | 74-101, | 72-128, | | 312-332, | | |
| | synthetase | 120-129, | 141-223, | | 539-555, | | |
| | beta subunit | 152-165, | 231-267, | | 558-620 | | |
| | (EC 6.1.1.20) - | 171-183, | 270-334, | | | | |
| | Psychrobacter | 192-224, | 339-605, | | | | |
| | cryohalolentis | 241-271, | 613-652, | | | | |
| | (strain K5) | 278-285, | 655-778 | | | | |
| | | 291-301, | | | | | |
| | | 303-319, | | | | | |
| | | 334-340, | | | | | |
| | | 367-391, | | | | | |
| | | 401-426, | | | | | |
| | | 437-442, | | | | | |
| | | 446-469, | | | | | |
| | | 475-488, | | | | | |
| | | 495-520, | | | | | |
| | | 523-529, | | | | | |
| | | 532-541, | | | | | |
| | | 543-550, | | | | | |
| | | 554-564, | | | | | |
| | | 570-598, | | | | | |
| | | 624-630, | | | | | |
| | | 633-638, | | | | | |
| | | 643-655, | | | | | |
| | | 663-685, | | | | | |
| | | 687-694, | | | | | |
| | | 698-725, | | | | | |
| | | 735-751, | | | | | |
| | | 758-765, | | | | | |
| | | 778-795 | | | | | |
| MCRH0546 | Putative | 15-39, 54-61 | 1-170, 175-230 | 2 | 162-217 | 27 | 241 |
| | uncharacterized | 65-71, | 244-278 | | | | |
| | protein - | 84-89, 98-111 | | | | | |
| | Pseudoalteromonas | 126-144 | | | | | |
| | haloplanktis | 154-160, | | | | | |
| | (strain TAC | 189-196, | | | | | |
| | 125 | 199-206, | | | | | |
| | | 218-224, | | | | | |
| | | 259-275 | | | | | |
| MCRH0558 | Nitric oxide | 22-37, 45-57, | 11-57, 72-88, | 4 | 60-145, | 28 | 242 |
| | reductase | 59-65, | 99-122, | | 187-223 | | |
| | large subunit- | 82-93, | 139-221, | | | | |
| | like protein - | 102-112, | 236-274, | | | | |
| | Psychrobacters | 160-172, | 279-328, | | | | |
| | (strain | 200-207, | 332-766 | | | | |
| | PRwf-1) | 229-236, | | | | | |
| | | 244-268, | | | | | |
| | | 275-322, | | | | | |
| | | 327-344, | | | | | |
| | | 346-369, | | | | | |
| | | 376-414, | | | | | |
| | | 428-451, | | | | | |
| | | 459-490, | | | | | |
| | | 495-527, | | | | | |
| | | 531-555, | | | | | |
| | | 561-582, | | | | | |
| | | 600-612, | | | | | |
| | | 616-622, | | | | | |
| | | 625-635, | | | | | |
| | | 638-669, | | | | | |
| | | 683-709, | | | | | |
| | | 726-732, | | | | | |
| | | 735-763 | | | | | |
| MCRH0580 | Ferredoxin- | 4-12, 32-78, | 1-208, 230-310, | 6 | 186-238, | 29 | 243 |
| | dependent | 81-89, 91-100, | 315-438, | | 398-572 | | |
| | glutamate | 105-111, | 440-456, | | | | |
| | synthase - | 125-132, | 467-580 | | | | |
| | Psychrobacters | 170-176, | | | | | |
| | (strain | 179-189, | | | | | |
| | PRwf-1) | 194-204, | | | | | |
| | | 223-229, | | | | | |
| | | 235-245, | | | | | |
| | | 259-276, | | | | | |
| | | 282-289, | | | | | |
| | | 303-313, | | | | | |
| | | 318-326, | | | | | |
| | | 334-345, | | | | | |
| | | 350-356, | | | | | |
| | | 364-370, | | | | | |
| | | 387-405, | | | | | |
| | | 409-422, | | | | | |
| | | 424-430, | | | | | |
| | | 442-457, | | | | | |
| | | 459-465, | | | | | |
| | | 490-516, | | | | | |
| | | 521-532, | | | | | |
| | | 534-541, | | | | | |
| | | 566-571 | | | | | |
| MCRH0587 | Putative DNA | 14-20, 28-35, | 22-125, | 6 | 59-74, 94-141, | 30 | 244 |
| | helicase - | 41-47, | 130-150, | | 143-203, | | |
| | Psychrobacter | 52-61, 73-86, | 157-177, | | 297-362 | | |
| | cryohalolentis | 92-103, | 179-368, | | | | |
| | (strain K5) | 124-141, | 403-495 | | | | |
| | | 143-158, | | | | | |
| | | 172-180, | | | | | |
| | | 185-191, | | | | | |
| | | 193-221, | | | | | |
| | | 239-250, | | | | | |
| | | 262-273, | | | | | |
| | | 280-290, | | | | | |
| | | 304-324, | | | | | |
| | | 328-357, | | | | | |
| | | 367-376, | | | | | |
| | | 378-384, | | | | | |
| | | 394-401, | | | | | |
| | | 420-428, | | | | | |
| | | 439-458, | | | | | |
| | | 460-469, | | | | | |
| | | 474-492 | | | | | |
| MCRH0594 | Dihydrouridine | 8-17, 25-39, | 1-170, 175-247, | 4 | 17-28, 61-99, | 31 | 245 |
| | synthase, | 41-67, 69-85, | 261-323 | | 221-240 | | |
| | DuS - | 93-115, | | | | | |
| | Psychrobacters | 123-143, | | | | | |
| | (strain | 145-157, | | | | | |
| | PRwf-1) | 166-174, | | | | | |
| | | 178-185, | | | | | |
| | | 188-199, | | | | | |
| | | 204-210, | | | | | |
| | | 221-238, | | | | | |
| | | 245-252, | | | | | |
| | | 257-268, | | | | | |
| | | 284-290, | | | | | |
| | | 294-306, | | | | | |
| | | 312-320 | | | | | |
| MCRH0621 | Phosphoribosylformylglycinamidine | 5-14, 16-26, | 8-53, 68-252, | 15 | 291-408, | 32 | 246 |
| | synthase (EC | 28-45, 54-60, | 265-283, | | 411-425, | | |
| | 6.3.5.3) - | 72-82, | 287-320, | | 500-552, | | |
| | Psychrobacters | 98-104, | 329-353, | | 719-741, | | |
| | (strain | 106-114, | 357-383, | | 975-1034, | | |
| | PRwf-1) | 121-132, | 389-470, | | 1089-1156, | | |
| | | 137-164, | 475-495, | | 1203-1234, | | |
| | | 169-175, | 507-527, | | 1273-1301 | | |
| | | 188-194, | 534-749, | | | | |
| | | 214-220, | 773-870, | | | | |
| | | 233-239, | 876-898, | | | | |
| | | 283-296, | 906-928, | | | | |
| | | 302-310, | 938-1150, | | | | |
| | | 336-347, | 1153-1255, | | | | |
| | | 357-364, | 1267-1287, | | | | |
| | | 400-407, | 1291-1314 | | | | |
| | | 419-425, | | | | | |
| | | 433-439, | | | | | |
| | | 443-452, | | | | | |
| | | 464-470, | | | | | |
| | | 492-499, | | | | | |
| | | 511-521, | | | | | |
| | | 528-534, | | | | | |
| | | 536-548, | | | | | |
| | | 564-571, | | | | | |
| | | 577-595, | | | | | |
| | | 597-611, | | | | | |
| | | 615-623, | | | | | |
| | | 637-649, | | | | | |
| | | 652-670, | | | | | |
| | | 681-700, | | | | | |
| | | 716-724, | | | | | |
| | | 726-738, | | | | | |
| | | 766-792, | | | | | |
| | | 806-833, | | | | | |
| | | 839-851, | | | | | |
| | | 853-872, | | | | | |
| | | 880-899, | | | | | |
| | | 905-912, | | | | | |
| | | 919-927, | | | | | |
| | | 935-956, | | | | | |
| | | 958-970, | | | | | |
| | | 980-988, | | | | | |
| | | 990-995, | | | | | |
| | | 1004-1013, | | | | | |
| | | 1017-1031, | | | | | |
| | | 1033-1039, | | | | | |
| | | 1043-1055, | | | | | |
| | | 1059-1068, | | | | | |
| | | 1087-1093, | | | | | |
| | | 1105-1114, | | | | | |
| | | 1116-1122, | | | | | |
| | | 1128-1134, | | | | | |
| | | 1149-1158, | | | | | |
| | | 1164-1172, | | | | | |
| | | 1197-1204, | | | | | |
| | | 1208-1215, | | | | | |
| | | 1230-1244, | | | | | |
| | | 1284-1290 | | | | | |
| MCRH0655 | Acriflavin | 9-20, 25-40, | 6-382, 385-465 | 9 | 204-286, | 33 | 247 |
| | resistance | 48-61, 70-84, | | | 310-463 | | |
| | protein - | 89-113, | | | | | |
| | Psychrobacters | 116-145, | | | | | |
| | (strain | 161-181, | | | | | |
| | PRwf-1) | 183-193, | | | | | |
| | | 196-212, | | | | | |
| | | 217-229, | | | | | |
| | | 235-246, | | | | | |
| | | 251-276, | | | | | |
| | | 284-290, | | | | | |
| | | 300-325, | | | | | |
| | | 338-349, | | | | | |
| | | 365-376, | | | | | |
| | | 387-393, | | | | | |
| | | 401-421, | | | | | |
| | | 429-438, | | | | | |
| | | 448-458 | | | | | |
| MCRH0673 | ATP- | 9-47, 52-61, | 1-463, 466-510, | 10 | 7-54, 198-314, | 34 | 248 |
| | dependent | 63-76, 82-88, | 519-641, | | 333-381, | | |
| | DNA helicase | 95-106, | 647-702 | | 404-452, | | |
| | RecG (EC | 112-126, | | | 523-549 | | |
| | 3.6.1.—) - | 132-138, | | | | | |
| | Psychrobacters | 145-154, | | | | | |
| | (strain | 162-176, | | | | | |
| | PRwf-1) | 178-223, | | | | | |
| | | 228-234, | | | | | |
| | | 236-247, | | | | | |
| | | 253-290, | | | | | |
| | | 300-307, | | | | | |
| | | 311-325, | | | | | |
| | | 327-347, | | | | | |
| | | 353-361, | | | | | |
| | | 379-408, | | | | | |
| | | 426-436, | | | | | |
| | | 454-460, | | | | | |
| | | 490-504, | | | | | |
| | | 506-517, | | | | | |
| | | 526-532, | | | | | |
| | | 539-545, | | | | | |
| | | 550-574, | | | | | |
| | | 580-591, | | | | | |
| | | 598-612, | | | | | |
| | | 616-622, | | | | | |
| | | 625-634, | | | | | |
| | | 652-668, | | | | | |
| | | 670-679, | | | | | |
| | | 682-688 | | | | | |
| MCRH0682 | Sulfate | 4-20, 24-38, | 8-88 | 11 | 15-72 | 35 | 249 |
| | adenylate | 40-64, 66-85 | | | | | |
| | transferase | | | | | | |
| | subunit 1 - | | | | | | |
| | Actinobacillus | | | | | | |
| | pleuropneumoniae | | | | | | |
| | serotype 3 | | | | | | |
| | (strain JL03) | | | | | | |
| MCRH0704 | S. 3-ketoacyl- | 6-15, 28-33, | 3-44, 64-172, | 4 | 56-110, | 36 | 250 |
| | CoA thiolase | 35-46, 54-65, | 175-191, | | 143-224, | | |
| | (EC 2.3.1.16) | 74-108, | 202-348 | | 252-308 | | |
| | (Fatty acid | 141-146, | | | | | |
| | oxidation | 172-178, | | | | | |
| | complex | 204-217, | | | | | |
| | subunit beta) | 221-231, | | | | | |
| | (Beta- | 242-248, | | | | | |
| | ketothiolase) | 251-257, | | | | | |
| | (Acetyl-CoA | 276-294, | | | | | |
| | acyltransferase) - | 298-304, | | | | | |
| | Psychrobacters | 316-332, | | | | | |
| | (strain | 341-353, | | | | | |
| | PRwf-1) | 356-363, | | | | | |
| | | 369-382 | | | | | |
| MCRH0744 | Prolylendopeptidase - | 4-28, 49-60, | 1-39, 46-64, | 6 | 609-738 | 37 | 251 |
| | Vibrio | 66-71, 158-164, | 80-100, | | | | |
| | parahaemolyticus | 215-221, | 105-130, | | | | |
| | | 254-275, | 142-162, | | | | |
| | | 288-294, | 166-233, | | | | |
| | | 318-326, | 249-342, | | | | |
| | | 338-344, | 352-467, | | | | |
| | | 366-380, | 470-511, | | | | |
| | | 389-395, | 539-591, | | | | |
| | | 400-421, | 596-687, | | | | |
| | | 423-430, | 689-859 | | | | |
| | | 450-458, | | | | | |
| | | 465-470, | | | | | |
| | | 474-491, | | | | | |
| | | 495-504, | | | | | |
| | | 512-517, | | | | | |
| | | 543-563, | | | | | |
| | | 577-582, | | | | | |
| | | 587-594, | | | | | |
| | | 617-623, | | | | | |
| | | 631-637, | | | | | |
| | | 644-652, | | | | | |
| | | 677-691, | | | | | |
| | | 694-700, | | | | | |
| | | 705-733, | | | | | |
| | | 748-783, | | | | | |
| | | 791-819, | | | | | |
| | | 833-840, | | | | | |
| | | 847-854, | | | | | |
| | | 876-886 | | | | | |
| MCRH0756 | — | 7-31, 42-54, | 1-147, 155-276, | 1 | 87-164 | 38 | 252 |
| | | 56-64, 94-110, | 278-319, | | | | |
| | | 112-122, | 329-387, | | | | |
| | | 128-136, | 391-405 | | | | |
| | | 172-195, | | | | | |
| | | 198-224, | | | | | |
| | | 256-263, | | | | | |
| | | 281-287, | | | | | |
| | | 298-310, | | | | | |
| | | 340-346, | | | | | |
| | | 356-372 | | | | | |
| MCRH0759 | TonB- | 4-20, 33-41, | 1-20, 27-172, | 12 | 16-32, 133-197, | 39 | 253 |
| | dependent | 58-65, 78-86, | 175-195, | | 277-385, | | |
| | receptor | 93-100, | 218-270, | | 556-573, | | |
| | precursor - | 102-108, | 276-308, | | 798-874 | | |
| | Haemophilus | 114-161, | 334-388, | | | | |
| | somnus | 194-200, | 409-449, | | | | |
| | (strain 2336) | 202-212, | 451-712, | | | | |
| | (Histophilus | 218-225, | 741-824, | | | | |
| | somni (strain | 230-235, | 828-913 | | | | |
| | 2336)) | 243-250, | | | | | |
| | | 269-278, | | | | | |
| | | 291-301, | | | | | |
| | | 312-317, | | | | | |
| | | 329-340, | | | | | |
| | | 352-375, | | | | | |
| | | 416-422, | | | | | |
| | | 427-434, | | | | | |
| | | 443-453, | | | | | |
| | | 468-476, | | | | | |
| | | 481-491, | | | | | |
| | | 510-532, | | | | | |
| | | 537-554, | | | | | |
| | | 560-566, | | | | | |
| | | 574-588, | | | | | |
| | | 612-623, | | | | | |
| | | 653-663, | | | | | |
| | | 678-702, | | | | | |
| | | 721-728, | | | | | |
| | | 742-748, | | | | | |
| | | 770-778, | | | | | |
| | | 796-805, | | | | | |
| | | 807-817, | | | | | |
| | | 824-832, | | | | | |
| | | 856-864, | | | | | |
| | | 871-878, | | | | | |
| | | 885-900 | | | | | |
| MCRH0780 | 2- | 7-14, 17-30, | 25-79, 83-126, | 9 | 53-163, | 40 | 254 |
| | oxoglutarate | 35-40, 62-69, | 151-284, | | 191-246, | | |
| | dehydrogenase | 80-86, | 292-408, | | 457-515, | | |
| | E1 | 88-99, 109-118, | 415-511, | | 520-528, | | |
| | component | 120-133, | 532-577, | | 620-642, | | |
| | (EC 1.2.4.2) - | 154-179, | 594-627, | | 759-800, | | |
| | Psychrobacter | 203-209, | 634-735, | | 894-943 | | |
| | cryohalolentis | 216-226, | 740-809, | | | | |
| | (strain K5) | 237-245, | 815-866, | | | | |
| | | 253-260, | 885-916 | | | | |
| | | 265-273, | | | | | |
| | | 286-291, | | | | | |
| | | 315-339, | | | | | |
| | | 353-371, | | | | | |
| | | 390-398, | | | | | |
| | | 412-430, | | | | | |
| | | 435-448, | | | | | |
| | | 456-464, | | | | | |
| | | 476-487, | | | | | |
| | | 492-503, | | | | | |
| | | 522-533, | | | | | |
| | | 537-549, | | | | | |
| | | 579-590, | | | | | |
| | | 606-622, | | | | | |
| | | 648-654, | | | | | |
| | | 664-679, | | | | | |
| | | 681-692, | | | | | |
| | | 700-711, | | | | | |
| | | 718-730, | | | | | |
| | | 743-752, | | | | | |
| | | 763-798, | | | | | |
| | | 808-815, | | | | | |
| | | 823-838, | | | | | |
| | | 846-864, | | | | | |
| | | 891-925, | | | | | |
| | | 927-933, | | | | | |
| | | 935-948 | | | | | |
| MCRH0790 | Succinate | 21-31, 48-58, | 1-93, 98-116, | 5 | 251-272, | 41 | 255 |
| | dehydrogenase | 60-66, | 118-149, | | 290-363, | | |
| | subunit A | 83-89, 102-115, | 174-199, | | 424-502 | | |
| | (EC 1.3.5.1) - | 144-154, | 202-302, | | | | |
| | Psychrobacters | 159-168, | 319-393, | | | | |
| | (strain | 175-186, | 410-468, | | | | |
| | PRwf-1) | 195-200, | 493-578, | | | | |
| | | 206-218, | 582-623 | | | | |
| | | 244-250, | | | | | |
| | | 259-272, | | | | | |
| | | 293-299, | | | | | |
| | | 301-307, | | | | | |
| | | 324-330, | | | | | |
| | | 339-348, | | | | | |
| | | 358-369, | | | | | |
| | | 380-391, | | | | | |
| | | 404-421, | | | | | |
| | | 429-437, | | | | | |
| | | 456-467, | | | | | |
| | | 481-486, | | | | | |
| | | 495-502, | | | | | |
| | | 509-533, | | | | | |
| | | 536-550, | | | | | |
| | | 553-571, | | | | | |
| | | 575-580, | | | | | |
| | | 599-620 | | | | | |
| MCRH0808 | Putative | 12-19, 30-48, | 8-52, 80-171, | 7 | 15-64, 77-168, | 42 | 256 |
| | uncharacterized | 55-61, | 173-201, | | 190-252 | | |
| | protein - | 66-74, 103-115, | 208-237, | | | | |
| | Mannheimia | 117-131, | 240-258 | | | | |
| | haemolytica | 176-183, | | | | | |
| | PHL213 | 192-197, | | | | | |
| | | 200-222 | | | | | |
| MCRH0815 | RNA binding | 4-19, 31-58, | 1-55, 59-164, | 5 | 124-151, | 43 | 257 |
| | S1 domain | 61-70, 84-96, | 168-185, | | 326-341, | | |
| | protein - | 104-112, | 193-238, | | 567-720 | | |
| | Psychrobacters | 131-138, | 244-333, | | | | |
| | (strain | 143-165, | 343-375, | | | | |
| | PRwf-1) | 168-178, | 378-517, | | | | |
| | | 197-208, | 521-583, | | | | |
| | | 213-220, | 602-656, | | | | |
| | | 255-268, | 670-761, | | | | |
| | | 273-281, | 788-808 | | | | |
| | | 313-320, | | | | | |
| | | 334-354, | | | | | |
| | | 359-367, | | | | | |
| | | 369-376, | | | | | |
| | | 382-399, | | | | | |
| | | 406-420, | | | | | |
| | | 429-439, | | | | | |
| | | 441-461, | | | | | |
| | | 463-507, | | | | | |
| | | 513-544, | | | | | |
| | | 550-557, | | | | | |
| | | 569-580, | | | | | |
| | | 583-589, | | | | | |
| | | 598-618, | | | | | |
| | | 640-650, | | | | | |
| | | 675-680, | | | | | |
| | | 683-711, | | | | | |
| | | 713-739, | | | | | |
| | | 797-805 | | | | | |
| MCRH0853 | Putative | 5-12, 22-37, | 1-105, 121-344 | 3 | 141-168, | 44 | 258 |
| | uncharacterized | 47-75, 78-94, | | | 256-313 | | |
| | protein | 102-107, | | | | | |
| | (EC 5.3.4.1) - | 110-118, | | | | | |
| | Psychrobacter | 124-130, | | | | | |
| | arcticum | 140-154, | | | | | |
| | | 161-166, | | | | | |
| | | 185-193, | | | | | |
| | | 205-213, | | | | | |
| | | 218-237, | | | | | |
| | | 244-257, | | | | | |
| | | 264-269, | | | | | |
| | | 276-283, | | | | | |
| | | 289-315, | | | | | |
| | | 317-323, | | | | | |
| | | 334-341 | | | | | |
| MCRH0867 | Dihydrodipic | 33-48, 56-63, | 1-108, 110-265 | 5 | 4-75, 108-199 | 45 | 259 |
| | olinate | 65-79, | | | | | |
| | reductase (EC | 84-101, | | | | | |
| | 1.3.1.26) - | 109-122, | | | | | |
| | Psychrobacters | 127-160, | | | | | |
| | (strain | 211-216, | | | | | |
| | PRwf-1) | 224-229, | | | | | |
| | | 239-256 | | | | | |
| MCRH0911 | Glutamate-- | 6-14, 24-40, | 1-101, 115-152, | 5 | 35-136, | 46 | 260 |
| | cysteine | 47-60, 79-98, | 154-203, | | 348-355 | | |
| | ligase (EC | 102-108, | 210-314, | | | | |
| | 6.3.2.2) - | 114-120, | 321-368, | | | | |
| | Psychrobacter | 122-132, | 375-412, | | | | |
| | arcticum | 154-160, | 414-434, | | | | |
| | | 168-179, | 438-494, | | | | |
| | | 187-206, | 497-529, | | | | |
| | | 221-226, | 544-558 | | | | |
| | | 231-253, | | | | | |
| | | 255-268, | | | | | |
| | | 296-314, | | | | | |
| | | 316-337, | | | | | |
| | | 341-347, | | | | | |
| | | 357-378, | | | | | |
| | | 383-407, | | | | | |
| | | 418-425, | | | | | |
| | | 443-452, | | | | | |
| | | 456-462, | | | | | |
| | | 485-495, | | | | | |
| | | 503-510, | | | | | |
| | | 512-523, | | | | | |
| | | 533-543, | | | | | |
| | | 550-555 | | | | | |
| MCRH0917 | Putative | 4-11, 14-22, | 1-27, 29-48, | 1 | 322-374 | 47 | 261 |
| | UDP-N- | 24-29, 33-40, | 59-199, | | | | |
| | acetylmuramate: | 42-52, | 206-257, | | | | |
| | L-alanyl- | 54-70, 87-111, | 264-378, | | | | |
| | gamma-D- | 121-128, | 398-459 | | | | |
| | glutamyl- | 132-143, | | | | | |
| | meso | 149-168, | | | | | |
| | diaminopimelate | 180-190, | | | | | |
| | ligase - | 197-215, | | | | | |
| | Psychrobacter | 223-232, | | | | | |
| | arcticum | 244-251, | | | | | |
| | | 296-319, | | | | | |
| | | 328-349, | | | | | |
| | | 363-368, | | | | | |
| | | 378-399, | | | | | |
| | | 414-431, | | | | | |
| | | 434-440, | | | | | |
| | | 451-457 | | | | | |
| MCRH1023 | Putative | 4-20, 28-34, | 1-37, 52-81, | 2 | 29-90, 125-197 | 48 | 262 |
| | uncharacterized | 36-42, 56-72, | 93-152, | | | | |
| | protein - | 80-86, | 173-252, | | | | |
| | Acinetobacter | 97-110, | 266-406 | | | | |
| | baumannii | 118-127, | | | | | |
| | | 132-138, | | | | | |
| | | 145-150, | | | | | |
| | | 173-179, | | | | | |
| | | 181-195, | | | | | |
| | | 232-244, | | | | | |
| | | 250-263, | | | | | |
| | | 270-276, | | | | | |
| | | 308-314, | | | | | |
| | | 324-331, | | | | | |
| | | 336-343, | | | | | |
| | | 355-364, | | | | | |
| | | 398-403 | | | | | |
| MCRH1076 | L-threonine | 15-23, 31-38, | 1-87, 104-194, | 5 | 82-164, | 49 | 263 |
| | synthase (EC | 51-66, | 199-392, | | 236-325, | | |
| | 4.2.3.1) - | 89-105, | 404-425, | | 392-453 | | |
| | Psychrobacters | 123-130, | 443-466 | | | | |
| | (strain | 135-140, | | | | | |
| | PRwf-1) | 149-154, | | | | | |
| | | 198-208, | | | | | |
| | | 212-220, | | | | | |
| | | 228-239, | | | | | |
| | | 249-257, | | | | | |
| | | 261-267, | | | | | |
| | | 275-281, | | | | | |
| | | 300-310, | | | | | |
| | | 322-343, | | | | | |
| | | 354-365, | | | | | |
| | | 372-384, | | | | | |
| | | 394-404, | | | | | |
| | | 409-420, | | | | | |
| | | 422-429, | | | | | |
| | | 446-455, | | | | | |
| | | 459-468 | | | | | |
| MCRH1163 | Putative | 4-10, 17-46, | 1-160, 168-188, | 15 | 126-294 | 50 | 264 |
| | uncharacterized | 51-80, 87-92, | 200-263, | | | | |
| | protein - | 99-121, | 276-355 | | | | |
| | Deinococcus | 135-150, | | | | | |
| | radiodurans | 170-176, | | | | | |
| | | 200-212, | | | | | |
| | | 243-252, | | | | | |
| | | 277-282, | | | | | |
| | | 310-331, | | | | | |
| | | 340-349 | | | | | |
| MCRH1198 | DNA repair | 4-18, 35-48, | 1-62, 84-178, | 8 | 53-62, 112-187, | 51 | 265 |
| | protein RecN - | 52-67, 73-80, | 182-264, | | 233-265, | | |
| | Psychrobacter | 90-96, | 295-396, | | 375-402 | | |
| | cryohalolentis | 108-147, | 403-452, | | | | |
| | (strain K5) | 156-171, | 461-502, | | | | |
| | | 188-207, | 520-568 | | | | |
| | | 227-234, | | | | | |
| | | 239-248, | | | | | |
| | | 263-286, | | | | | |
| | | 301-330, | | | | | |
| | | 347-363, | | | | | |
| | | 365-395, | | | | | |
| | | 409-419, | | | | | |
| | | 421-431, | | | | | |
| | | 442-447, | | | | | |
| | | 454-468, | | | | | |
| | | 471-482, | | | | | |
| | | 484-510, | | | | | |
| | | 517-525, | | | | | |
| | | 545-555 | | | | | |
| MCRH1227 | MFS cyanate | 13-31, 36-48, | 14-409 | 2 | 23-124, | 52 | 266 |
| | efflux pump, | 54-64, | | | 134-172 | | |
| | CynX - | 67-83, 93-104, | | | | | |
| | Psychrobacter | 106-126, | | | | | |
| | arcticum | 128-137, | | | | | |
| | | 144-154, | | | | | |
| | | 161-169, | | | | | |
| | | 179-196, | | | | | |
| | | 205-221, | | | | | |
| | | 232-255, | | | | | |
| | | 257-263, | | | | | |
| | | 265-305, | | | | | |
| | | 307-324, | | | | | |
| | | 326-340, | | | | | |
| | | 354-367, | | | | | |
| | | 372-378, | | | | | |
| | | 383-402 | | | | | |
| MCRH1256 | Putative | 5-21, 26-35, | 1-78, 81-112 | 1 | 41-103 | 53 | 267 |
| | ComEA | 37-44, 57-69, | | | | | |
| | protein- | 71-78, | | | | | |
| | related | 84-93, 95-101 | | | | | |
| | protein - | | | | | | |
| | Candidatus | | | | | | |
| | Cloacamonas | | | | | | |
| | acidaminovorans | | | | | | |
| MCRH1257 | Poly(A) | 13-19, 21-42, | 1-47, 50-65, | 23 | 14-77, 217-269, | 54 | 268 |
| | polymerase - | 47-55, | 80-108, | | 380-542 | | |
| | Psychrobacters | 57-66, 68-74, | 121-135, | | | | |
| | (strain | 77-82, | 145-234, | | | | |
| | PRwf-1) | 84-90, 92-101, | 236-322, | | | | |
| | | 106-112, | 326-379, | | | | |
| | | 147-169, | 396-488, | | | | |
| | | 171-183, | 502-522, | | | | |
| | | 185-200, | 564-589 | | | | |
| | | 221-230, | | | | | |
| | | 240-252, | | | | | |
| | | 269-275, | | | | | |
| | | 284-296, | | | | | |
| | | 299-308, | | | | | |
| | | 311-322, | | | | | |
| | | 332-342, | | | | | |
| | | 344-358, | | | | | |
| | | 374-382, | | | | | |
| | | 386-391, | | | | | |
| | | 403-412, | | | | | |
| | | 445-451, | | | | | |
| | | 462-477, | | | | | |
| | | 484-494, | | | | | |
| | | 557-563, | | | | | |
| | | 565-574 | | | | | |
| MCRH1303 | Putative | 4-34, 36-44, | 1-87, 89-172, | 2 | 191-197, | 55 | 269 |
| | hemolysin- | 51-57, 63-68, | 175-193, | | 350-438 | | |
| | related | 70-80, | 222-244, | | | | |
| | protein - | 91-130, | 247-366, | | | | |
| | Acinetobacter | 136-173, | 381-409, | | | | |
| | baumannii | 186-193, | 416-437 | | | | |
| | | 195-201, | | | | | |
| | | 207-213, | | | | | |
| | | 226-234, | | | | | |
| | | 242-266, | | | | | |
| | | 268-284, | | | | | |
| | | 290-308, | | | | | |
| | | 315-332, | | | | | |
| | | 368-378, | | | | | |
| | | 386-402, | | | | | |
| | | 413-437 | | | | | |
| MCRH1397 | Thiamin- | 11-24, 29-51, | 10-66, 69-102, | 6 | 2-98 | 56 | 270 |
| | monophosphate | 61-91, | 111-145 | | | | |
| | kinase (EC | 98-116, | | | | | |
| | 2.7.4.16) - | 119-129, | | | | | |
| | Acinetobacters | 132-142 | | | | | |
| | (strain | | | | | | |
| | ADP1) | | | | | | |
| MCRH1430 | S-adenosyl- | 16-49, 55-74, | 1-333 | 6 | 32-89, 108-141, | 57 | 271 |
| | methyltransferase | 78-88, | | | 246-333 | | |
| | MraW - | 91-112, | | | | | |
| | Psychrobacters | 119-127, | | | | | |
| | (strain | 140-145, | | | | | |
| | PRwf-1) | 156-165, | | | | | |
| | | 167-173, | | | | | |
| | | 199-209, | | | | | |
| | | 234-249, | | | | | |
| | | 251-263, | | | | | |
| | | 265-272, | | | | | |
| | | 282-290, | | | | | |
| | | 299-305, | | | | | |
| | | 322-330 | | | | | |
| MCRH1438 | Putative | 19-43, 49-55, | 1-65, 68-113 | 1 | 45-108 | 58 | 272 |
| | uncharacterized | 78-92 | | | | | |
| | protein - | | | | | | |
| | Psychrobacter | | | | | | |
| | cryohalolentis | | | | | | |
| | (strain K5) | | | | | | |
| MCRH1440 | Peptidoglycan | 15-23, 52-84, | 23-105, | 7 | 158-222, | 59 | 273 |
| | synthetase | 97-103, | 115-152, | | 327-423, | | |
| | FtsI (EC | 110-133, | 154-220, | | 427-526 | | |
| | 2.4.1.129) - | 149-154, | 226-263, | | | | |
| | Psychrobacters | 160-183, | 276-296, | | | | |
| | (strain | 203-227, | 302-368, | | | | |
| | PRwf-1) | 233-241, | 378-402, | | | | |
| | | 243-250, | 414-477, | | | | |
| | | 313-330, | 481-536, | | | | |
| | | 338-351, | 539-581, | | | | |
| | | 373-382, | 588-652 | | | | |
| | | 384-396, | | | | | |
| | | 401-407, | | | | | |
| | | 425-452, | | | | | |
| | | 469-474, | | | | | |
| | | 476-482, | | | | | |
| | | 490-513, | | | | | |
| | | 519-528, | | | | | |
| | | 533-545, | | | | | |
| | | 591-613, | | | | | |
| | | 619-649 | | | | | |
| MCRH1475 | S. Translation | 4-11, 19-29, | 39-105, | 10 | 78-130, | 60 | 274 |
| | initiation | 43-52, 82-96, | 132-176, | | 215-292, | | |
| | factor IF-2 - | 101-110, | 183-247, | | 655-713, | | |
| | Psychrobacters | 138-144, | 258-292, | | 818-880 | | |
| | (strain | 157-165, | 300-324, | | | | |
| | PRwf-1) | 258-268, | 328-398, | | | | |
| | | 326-334, | 405-506, | | | | |
| | | 336-344, | 512-532, | | | | |
| | | 346-358, | 544-653, | | | | |
| | | 377-383, | 659-838, | | | | |
| | | 386-394, | 840-885 | | | | |
| | | 397-405, | | | | | |
| | | 413-427, | | | | | |
| | | 429-434, | | | | | |
| | | 437-443, | | | | | |
| | | 449-458, | | | | | |
| | | 486-495, | | | | | |
| | | 514-521, | | | | | |
| | | 535-546, | | | | | |
| | | 554-560, | | | | | |
| | | 566-578, | | | | | |
| | | 589-596, | | | | | |
| | | 603-612, | | | | | |
| | | 618-625, | | | | | |
| | | 644-659, | | | | | |
| | | 662-671, | | | | | |
| | | 675-680, | | | | | |
| | | 707-720, | | | | | |
| | | 722-735, | | | | | |
| | | 737-752, | | | | | |
| | | 754-771, | | | | | |
| | | 788-802, | | | | | |
| | | 816-830, | | | | | |
| | | 836-844, | | | | | |
| | | 851-870, | | | | | |
| | | 884-909 | | | | | |
| MCRH1486 | S. Ribosome- | 5-14, 21-27, | 1-63, 81-141 | 4 | 58-141 | 61 | 275 |
| | binding factor | 29-37, 46-72, | | | | | |
| | A - | 83-96, | | | | | |
| | Psychrobacter | 113-121, | | | | | |
| | arcticum | 129-134 | | | | | |
| MCRH1493 | OlpA - | 4-9, 20-34, | 1-53, 75-116, | 7 | 92-234 | 62 | 276 |
| | Moraxella | 36-54, 88-94, | 126-174, | | | | |
| | catarrhalis | 124-148, | 177-235 | | | | |
| | | 155-161, | | | | | |
| | | 182-202, | | | | | |
| | | 204-211, | | | | | |
| | | 220-232 | | | | | |
| MCRH1546 | — | 4-22, 31-38, | 1-24, 28-49 | 24 | 7-65 | 63 | 277 |
| | | 49-55, 82-91 | | | | | |
| MCRH1561 | Sulphate | 4-28, 30-83, | 1-298, 301-566 | 4 | 14-31, 282-347 | 64 | 278 |
| | transporter - | 85-92, 94-123, | | | | | |
| | Psychrobacters | 125-157, | | | | | |
| | (strain | 163-196, | | | | | |
| | PRwf-1) | 216-234, | | | | | |
| | | 240-258, | | | | | |
| | | 260-289, | | | | | |
| | | 307-313, | | | | | |
| | | 315-323, | | | | | |
| | | 328-378, | | | | | |
| | | 392-424, | | | | | |
| | | 428-440, | | | | | |
| | | 458-472, | | | | | |
| | | 474-482, | | | | | |
| | | 491-506, | | | | | |
| | | 508-530, | | | | | |
| | | 539-564 | | | | | |
| MCRH1565 | Probable zinc | 7-17, 20-28, | 1-158, 163-275 | 4 | 60-112, | 65 | 279 |
| | metallopeptidases, | 30-37, 39-47, | | | 149-246 | | |
| | family | 49-61, | | | | | |
| | M48 - | 77-96, 114-128, | | | | | |
| | Psychrobacter | 149-154, | | | | | |
| | arcticum | 166-180, | | | | | |
| | | 182-200, | | | | | |
| | | 240-248, | | | | | |
| | | 256-271 | | | | | |
| MCRH1568 | Phosphate | 6-25, 31-37, | 1-46, 48-196, | 4 | 184-277 | 66 | 280 |
| | ABC | 43-57, 63-72, | 208-231, | | | | |
| | transporter, | 82-90, | 234-278, | | | | |
| | periplasmic | 96-107, | 290-374 | | | | |
| | phosphate- | 109-118, | | | | | |
| | binding | 123-140, | | | | | |
| | protein - | 144-149, | | | | | |
| | Psychrobacters | 155-162, | | | | | |
| | (strain | 168-182, | | | | | |
| | PRwf-1) | 184-190, | | | | | |
| | | 213-219, | | | | | |
| | | 237-244, | | | | | |
| | | 247-256, | | | | | |
| | | 262-268, | | | | | |
| | | 271-284, | | | | | |
| | | 295-301, | | | | | |
| | | 307-320, | | | | | |
| | | 325-337, | | | | | |
| | | 346-364 | | | | | |
| MCRH1577 | Phosphate | 27-46, 53-77, | 2-210, 215-271 | 6 | 12-138 | 67 | 281 |
| | ABC | 103-123, | | | | | |
| | transporter, | 130-142, | | | | | |
| | ATPase | 153-159, | | | | | |
| | subunit | 171-179, | | | | | |
| | precursor - | 182-209, | | | | | |
| | Psychrobacters | 215-222, | | | | | |
| | (strain | 224-233, | | | | | |
| | PRwf-1) | 237-243, | | | | | |
| | | 271-276 | | | | | |
| MCRH1586 | Ppx/GppA | 17-24, 38-45, | 8-134, 141-167, | 9 | 284-393, | 68 | 282 |
| | phosphatase | 49-67, | 175-224, | | 462-469 | | |
| | (EC 3.6.1.40) - | 80-86, 94-112, | 231-473, | | | | |
| | Psychrobacters | 119-141, | 479-496 | | | | |
| | (strain | 154-159, | | | | | |
| | PRwf-1) | 165-171, | | | | | |
| | | 183-200, | | | | | |
| | | 218-226, | | | | | |
| | | 234-252, | | | | | |
| | | 263-291, | | | | | |
| | | 328-336, | | | | | |
| | | 338-349, | | | | | |
| | | 357-385, | | | | | |
| | | 397-405, | | | | | |
| | | 423-440, | | | | | |
| | | 445-453, | | | | | |
| | | 457-466, | | | | | |
| | | 470-477, | | | | | |
| | | 487-493 | | | | | |
| MCRH1671 | GTP-binding | 4-9, 16-23, | 1-20, 39-103 | 5 | 11-36 | 69 | 283 |
| | protein Era - | 56-64, 70-82, | | | | | |
| | Psychrobacters | 86-93 | | | | | |
| | (strain | | | | | | |
| | PRwf-1) | | | | | | |
| MCRH1677 | Outer | 5-38, 69-77, | 1-49, 54-69, | 3 | 65-116, | 70 | 284 |
| | membrane | 83-99, 143-151, | 96-110, | | 179-231, | | |
| | protein CD | 154-160, | 130-248, | | 328-395 | | |
| | precursor | 176-186, | 251-270, | | | | |
| | (OmpCD) - | 198-210, | 312-368, | | | | |
| | Moraxella | 226-268, | 382-450 | | | | |
| | catarrhalis | 270-288, | | | | | |
| | | 293-303, | | | | | |
| | | 305-324, | | | | | |
| | | 327-342, | | | | | |
| | | 344-353, | | | | | |
| | | 388-394, | | | | | |
| | | 432-438 | | | | | |
| MCRH1696 | Extracellular | 8-23, 58-70, | 1-27, 30-46, | 3 | 3-91 | 71 | 285 |
| | solute- | 74-80, 85-91, | 53-71, 77-171, | | | | |
| | binding | 95-103, | 181-264 | | | | |
| | protein, | 110-127, | | | | | |
| | family 3 | 143-150, | | | | | |
| | precursor - | 153-160, | | | | | |
| | Psychrobacters | 164-171, | | | | | |
| | (strain | 189-201, | | | | | |
| | PRwf-1) | 218-224, | | | | | |
| | | 228-233, | | | | | |
| | | 236-242, | | | | | |
| | | 248-255 | | | | | |
| MCRH1701 | Extracellular | 4-19, 30-49, | 1-22, 33-51, | 6 | 108-262 | 72 | 286 |
| | solute- | 57-83, 88-100, | 55-99, 114-139, | | | | |
| | binding | 111-119, | 163-204, | | | | |
| | protein, | 122-129, | 220-250 | | | | |
| | family 3 | 154-159, | | | | | |
| | precursor - | 168-173, | | | | | |
| | Psychrobacters | 189-200, | | | | | |
| | (strain | 222-229, | | | | | |
| | PRwf-1) | 237-243, | | | | | |
| | | 251-259 | | | | | |
| MCRH1705 | ABC | 4-19, 26-51, | 1-174, 176-277 | 1 | 47-117 | 73 | 287 |
| | transporter | 53-62, 68-79, | | | | | |
| | related - | 83-96, | | | | | |
| | Psychrobacters | 99-105, | | | | | |
| | (strain | 114-122, | | | | | |
| | PRwf-1) | 128-135, | | | | | |
| | | 138-146, | | | | | |
| | | 155-164, | | | | | |
| | | 180-199, | | | | | |
| | | 201-218, | | | | | |
| | | 226-232, | | | | | |
| | | 237-249, | | | | | |
| | | 257-264 | | | | | |
| MCRH1720 | DNA | 12-17, 23-31, | 9-61, 75-124, | 11 | 59-133, | 74 | 288 |
| | topoisomerase | 42-62, | 132-288, | | 260-272, | | |
| | I (EC | 81-88, 96-103, | 299-547, | | 382-410, | | |
| | 5.99.1.2) - | 109-118, | 592-608, | | 440-515, | | |
| | Psychrobacters | 122-128, | 612-660, | | 711-872 | | |
| | (strain | 136-146, | 666-695, | | | | |
| | PRwf-1) | 151-158, | 733-753, | | | | |
| | | 188-203, | 776-813, | | | | |
| | | 210-224, | 818-854, | | | | |
| | | 229-238, | 858-875 | | | | |
| | | 270-287, | | | | | |
| | | 296-308, | | | | | |
| | | 310-333, | | | | | |
| | | 341-354, | | | | | |
| | | 361-368, | | | | | |
| | | 383-395, | | | | | |
| | | 404-420, | | | | | |
| | | 423-435, | | | | | |
| | | 443-456, | | | | | |
| | | 460-503, | | | | | |
| | | 510-517, | | | | | |
| | | 521-526, | | | | | |
| | | 541-548, | | | | | |
| | | 565-570, | | | | | |
| | | 575-586, | | | | | |
| | | 606-617, | | | | | |
| | | 625-637, | | | | | |
| | | 648-655, | | | | | |
| | | 683-696, | | | | | |
| | | 702-713, | | | | | |
| | | 722-728, | | | | | |
| | | 740-748, | | | | | |
| | | 779-786, | | | | | |
| | | 789-801, | | | | | |
| | | 807-812, | | | | | |
| | | 820-829, | | | | | |
| | | 849-854, | | | | | |
| | | 862-868 | | | | | |
| MCRH1732 | DNA | 15-24, 28-56, | 1-155, 162-181, | 9 | 700-781, | 75 | 289 |
| | polymerase I | 63-87, | 186-321, | | 800-903 | | |
| | (EC 2.7.7.7) - | 98-104, | 346-600, | | | | |
| | Psychrobacters | 112-121, | 608-760, | | | | |
| | (strain | 125-133, | 778-897, | | | | |
| | PRwf-1) | 142-159, | 910-953 | | | | |
| | | 166-176, | | | | | |
| | | 189-198, | | | | | |
| | | 200-207, | | | | | |
| | | 216-223, | | | | | |
| | | 225-231, | | | | | |
| | | 236-243, | | | | | |
| | | 245-252, | | | | | |
| | | 262-287, | | | | | |
| | | 295-304, | | | | | |
| | | 315-323, | | | | | |
| | | 326-332, | | | | | |
| | | 340-356, | | | | | |
| | | 361-368, | | | | | |
| | | 370-376, | | | | | |
| | | 387-398, | | | | | |
| | | 401-410, | | | | | |
| | | 412-420, | | | | | |
| | | 422-434, | | | | | |
| | | 442-455, | | | | | |
| | | 469-476, | | | | | |
| | | 486-496, | | | | | |
| | | 507-514, | | | | | |
| | | 519-527, | | | | | |
| | | 547-556, | | | | | |
| | | 559-564, | | | | | |
| | | 569-575, | | | | | |
| | | 588-594, | | | | | |
| | | 604-609, | | | | | |
| | | 611-622, | | | | | |
| | | 634-662, | | | | | |
| | | 676-686, | | | | | |
| | | 712-718, | | | | | |
| | | 723-738, | | | | | |
| | | 752-758, | | | | | |
| | | 779-790, | | | | | |
| | | 793-822, | | | | | |
| | | 833-850, | | | | | |
| | | 866-891, | | | | | |
| | | 894-908, | | | | | |
| | | 935-950 | | | | | |
| MCRH1742 | S. Peptide | 25-31, 41-54, | 2-33, 36-217, | 20 | 2-122, 192-306 | 76 | 290 |
| | chain release | 79-86, | 231-251 | | | | |
| | factor 3 (RF- | 88-96, 111-125, | 263-363, | | | | |
| | 3) - | 135-141, | 367-427, | | | | |
| | Psychrobacters | 145-152, | 430-527 | | | | |
| | (strain | 159-182, | | | | | |
| | PRwf-1) | 188-195, | | | | | |
| | | 208-214, | | | | | |
| | | 257-267, | | | | | |
| | | 275-297, | | | | | |
| | | 306-312, | | | | | |
| | | 326-333, | | | | | |
| | | 342-358, | | | | | |
| | | 370-377, | | | | | |
| | | 399-414, | | | | | |
| | | 420-428, | | | | | |
| | | 434-439, | | | | | |
| | | 446-492, | | | | | |
| | | 499-507, | | | | | |
| | | 509-521, | | | | | |
| | | 527-533 | | | | | |
| MCRH1777 | Uncharacterized | 6-13, 18-26, | 1-83, 100-280, | 5 | 63-151, | 77 | 291 |
| | iron- | 28-46, 49-56, | 295-370, | | 220-291, | | |
| | regulated | 62-69, | 374-509 | | 321-388 | | |
| | membrane | 74-84, 88-110, | | | | | |
| | protein-like | 116-132, | | | | | |
| | protein - | 135-149, | | | | | |
| | Psychrobacters | 156-178, | | | | | |
| | (strain | 181-191, | | | | | |
| | PRwf-1) | 202-223, | | | | | |
| | | 247-260, | | | | | |
| | | 274-281, | | | | | |
| | | 295-303, | | | | | |
| | | 336-344, | | | | | |
| | | 368-375, | | | | | |
| | | 377-390, | | | | | |
| | | 395-404, | | | | | |
| | | 409-433, | | | | | |
| | | 450-458, | | | | | |
| | | 470-506 | | | | | |
| MCRH1841 | McmA - | 4-11, 16-27, | 7-194, 202-235, | 30 | 96-113, | 78 | 292 |
| | Moraxella | 31-41, 62-81, | 261-383, | | 634-656, | | |
| | catarrhalis | 101-108, | 401-505, | | 658-734 | | |
| | | 116-144, | 524-617, | | | | |
| | | 169-185, | 624-727, | | | | |
| | | 203-218, | 735-749, | | | | |
| | | 228-234, | 761-879, | | | | |
| | | 236-245, | 898-973, | | | | |
| | | 255-273, | 975-989 | | | | |
| | | 283-294, | | | | | |
| | | 298-304, | | | | | |
| | | 306-313, | | | | | |
| | | 315-340, | | | | | |
| | | 342-350, | | | | | |
| | | 357-371, | | | | | |
| | | 378-390, | | | | | |
| | | 402-416, | | | | | |
| | | 421-436, | | | | | |
| | | 444-456, | | | | | |
| | | 458-464, | | | | | |
| | | 481-487, | | | | | |
| | | 496-508, | | | | | |
| | | 510-531, | | | | | |
| | | 536-541, | | | | | |
| | | 544-551, | | | | | |
| | | 556-569, | | | | | |
| | | 576-590, | | | | | |
| | | 600-614, | | | | | |
| | | 627-636, | | | | | |
| | | 644-651, | | | | | |
| | | 664-670, | | | | | |
| | | 675-688, | | | | | |
| | | 700-720, | | | | | |
| | | 727-770, | | | | | |
| | | 775-797, | | | | | |
| | | 802-818, | | | | | |
| | | 828-835, | | | | | |
| | | 864-884, | | | | | |
| | | 887-892, | | | | | |
| | | 899-907, | | | | | |
| | | 918-928, | | | | | |
| | | 940-958, | | | | | |
| | | 965-980 | | | | | |
| MCRH1853 | HI0933 | 4-12, 14-23, | 1-100, 105-343, | 3 | 76-101, | 79 | 293 |
| | family protein - | 26-35, 51-78, | 365-406 | | 295-353 | | |
| | Psychrobacters | 83-94, | | | | | |
| | (strain | 100-106, | | | | | |
| | PRwf-1) | 109-119, | | | | | |
| | | 121-135, | | | | | |
| | | 140-149, | | | | | |
| | | 153-177, | | | | | |
| | | 179-202, | | | | | |
| | | 212-224, | | | | | |
| | | 229-239, | | | | | |
| | | 241-252, | | | | | |
| | | 260-312, | | | | | |
| | | 330-336, | | | | | |
| | | 342-352, | | | | | |
| | | 368-383, | | | | | |
| | | 393-403 | | | | | |
| MCRH1878 | S. Glycyl- | 4-28, 31-38, | 1-84 | 1 | 9-69 | 80 | 294 |
| | tRNA | 65-81 | | | | | |
| | synthetase | | | | | | |
| | alpha subunit | | | | | | |
| | (EC 6.1.1.14) | | | | | | |
| | (Glycine-- | | | | | | |
| | tRN ligase | | | | | | |
| | alpha subunit) | | | | | | |
| | (GlyRS) - | | | | | | |
| | Moraxella | | | | | | |
| | catarrhalis | | | | | | |
| MCRH1934 | RNAse E (EC | 4-11, 26-35, | 1-104, 108-152, | 11 | 378-625, | 81 | 295 |
| | 3.1.4.—) - | 55-74, 78-90, | 161-190, | | 795-908 | | |
| | Psychrobacters | 109-115, | 195-323, | | | | |
| | (strain | 125-141, | 337-366, | | | | |
| | PRwf-1) | 164-169, | 369-410, | | | | |
| | | 173-181, | 415-449, | | | | |
| | | 193-203, | 453-495, | | | | |
| | | 212-231, | 532-552, | | | | |
| | | 253-266, | 559-624, | | | | |
| | | 289-295, | 677-697, | | | | |
| | | 297-313, | 724-751, | | | | |
| | | 350-356, | 784-802, | | | | |
| | | 380-388, | 804-824, | | | | |
| | | 410-416, | 834-931, | | | | |
| | | 425-433, | 949-977, | | | | |
| | | 449-462, | 979-999, | | | | |
| | | 466-473, | 1060-1149 | | | | |
| | | 478-497, | | | | | |
| | | 562-584, | | | | | |
| | | 586-606, | | | | | |
| | | 614-619, | | | | | |
| | | 718-724, | | | | | |
| | | 727-738, | | | | | |
| | | 745-752, | | | | | |
| | | 782-789, | | | | | |
| | | 812-821, | | | | | |
| | | 827-834, | | | | | |
| | | 844-854, | | | | | |
| | | 864-874, | | | | | |
| | | 902-908, | | | | | |
| | | 920-927, | | | | | |
| | | 952-957, | | | | | |
| | | 966-973, | | | | | |
| | | 982-988, | | | | | |
| | | 1010-1019, | | | | | |
| | | 1027-1034, | | | | | |
| | | 1050-1057, | | | | | |
| | | 1082-1088, | | | | | |
| | | 1111-1125, | | | | | |
| | | 1129-1135, | | | | | |
| | | 1150-1163 | | | | | |
| MCRH2003 | Phospholipid/ | 7-31, 36-49, | 1-42, 58-233, | 2 | 181-234 | 82 | 296 |
| | glycerol | 59-66, 78-85, | 236-279, | | | | |
| | acyltransferase | 89-95, | 290-315 | | | | |
| | precursor - | 101-120, | | | | | |
| | Psychrobacter | 127-151, | | | | | |
| | cryohalolentis | 174-183, | | | | | |
| | (strain K5) | 185-194, | | | | | |
| | | 207-217, | | | | | |
| | | 221-230, | | | | | |
| | | 238-247, | | | | | |
| | | 258-268, | | | | | |
| | | 290-297, | | | | | |
| | | 309-315 | | | | | |
| MCRH2082 | S. 30S | 17-25, 60-72, | 1-72, 74-120 | 4 | 22-110 | 83 | 297 |
| | ribosomal | 80-90, | | | | | |
| | protein S11 - | 97-109, | | | | | |
| | Psychrobacters | 111-117 | | | | | |
| | (strain | | | | | | |
| | PRwf-1) | | | | | | |
| MCRH2139 | UDP-N- | 4-31, 44-53, | 1-35, 45-218, | 3 | 105-193, | 84 | 298 |
| | acetylmuramoylalanine- | 55-70, 76-99, | 225-323, | | 327-355 | | |
| | D- | 109-115, | 347-386, | | | | |
| | glutamate | 123-130, | 388-403, | | | | |
| | ligase (EC | 136-142, | 405-446, | | | | |
| | 6.3.2.9) - | 147-155, | 448-469 | | | | |
| | Acinetobacter | 158-191, | | | | | |
| | baumannii | 199-220, | | | | | |
| | | 223-235, | | | | | |
| | | 243-257, | | | | | |
| | | 264-281, | | | | | |
| | | 286-299, | | | | | |
| | | 313-323, | | | | | |
| | | 350-365, | | | | | |
| | | 373-391, | | | | | |
| | | 397-441, | | | | | |
| | | 455-466 | | | | | |
| MCRH2151 | Probable | 4-19, 47-53, | 1-32, 75-89, | 5 | 43-142, | 85 | 299 |
| | DNA/RNA | 69-75, 81-87, | 107-127, | | 300-314 | | |
| | non-specific | 109-122, | 133-171, | | | | |
| | endonuclease | 125-140, | 188-310, | | | | |
| | (Mg- | 142-156, | 325-349 | | | | |
| | dependent) - | 191-199, | | | | | |
| | Psychrobacter | 219-238, | | | | | |
| | arcticum | 246-271, | | | | | |
| | | 279-290, | | | | | |
| | | 296-302, | | | | | |
| | | 305-313, | | | | | |
| | | 321-327, | | | | | |
| | | 331-345 | | | | | |
| MCRH2184 | Mg chelatase, | 4-43, 49-56, | 1-38, 43-62, | 3 | 19-76, 195-221, | 86 | 300 |
| | subunit ChlI - | 66-74, 80-94, | 77-137, | | 271-292 | | |
| | Psychrobacters | 97-110, | 140-173, | | | | |
| | (strain | 116-136, | 179-291, | | | | |
| | PRwf-1) | 139-145, | 328-376, | | | | |
| | | 151-163, | 386-400, | | | | |
| | | 165-178, | 406-504 | | | | |
| | | 182-210, | | | | | |
| | | 213-220, | | | | | |
| | | 222-231, | | | | | |
| | | 241-252, | | | | | |
| | | 256-271, | | | | | |
| | | 277-293, | | | | | |
| | | 300-314, | | | | | |
| | | 330-336, | | | | | |
| | | 340-363, | | | | | |
| | | 369-375, | | | | | |
| | | 381-404, | | | | | |
| | | 419-426, | | | | | |
| | | 439-445, | | | | | |
| | | 447-453, | | | | | |
| | | 465-501 | | | | | |
| MCRH2216 | Selenocysteine | 4-19, 25-31, | 10-99, 101-185, | 1 | 74-161 | 87 | 301 |
| | synthase | 40-63, 71-80, | 200-294, | | | | |
| | (EC 2.9.1.1) - | 89-98, | 297-347 | | | | |
| | Haemophilus | 101-119, | | | | | |
| | influenzae | 125-151, | | | | | |
| | (strain | 159-164, | | | | | |
| | PittEE) | 173-201, | | | | | |
| | | 219-227, | | | | | |
| | | 247-258, | | | | | |
| | | 263-284, | | | | | |
| | | 308-319, | | | | | |
| | | 321-326 | | | | | |
| MCRH2239 | Putative | 12-18, 25-31, | 1-28, 33-134, | 15 | 25-59, 156-270, | 88 | 302 |
| | uncharacterized | 37-43, | 137-179, | | 272-335, | | |
| | protein - | 76-94, 121-135, | 181-221, | | 557-565 | | |
| | Pseudomonas | 146-176, | 255-323, | | | | |
| | fluorescens | 191-199, | 333-439, | | | | |
| | (strain PfO-1) | 205-212, | 443-532, | | | | |
| | | 259-290, | 537-692 | | | | |
| | | 300-313, | | | | | |
| | | 340-347, | | | | | |
| | | 364-373, | | | | | |
| | | 375-385, | | | | | |
| | | 413-420, | | | | | |
| | | 424-430, | | | | | |
| | | 446-462, | | | | | |
| | | 465-473, | | | | | |
| | | 475-486, | | | | | |
| | | 505-522, | | | | | |
| | | 537-544, | | | | | |
| | | 557-563, | | | | | |
| | | 573-582, | | | | | |
| | | 588-602, | | | | | |
| | | 604-613, | | | | | |
| | | 620-630, | | | | | |
| | | 638-675, | | | | | |
| | | 677-683 | | | | | |
| MCRH2257 | S. 10 kDa | 10-22, 24-54, | 1-60, 88-136 | 33 | 17-135 | 89 | 303 |
| | chaperonin | 63-70, | | | | | |
| | (Protein | 77-86, 94-110, | | | | | |
| | Cpn10) | 112-133 | | | | | |
| | (groES | | | | | | |
| | protein) - | | | | | | |
| | Psychrobacters | | | | | | |
| | (strain | | | | | | |
| | PRwf-1) | | | | | | |
| MCRH2276 | Monooxygenase - | 7-24, 28-47, | 4-47, 50-248, | 5 | 61-67, 168-195, | 90 | 304 |
| | Neisseria | 76-86, 92-103, | 261-393 | | 257-320 | | |
| | meningitidis | 122-129, | | | | | |
| | serogroup C | 135-141, | | | | | |
| | (strain | 152-157, | | | | | |
| | 053442) | 162-173, | | | | | |
| | | 192-205, | | | | | |
| | | 210-225, | | | | | |
| | | 230-236, | | | | | |
| | | 270-286, | | | | | |
| | | 289-297, | | | | | |
| | | 299-314, | | | | | |
| | | 316-328, | | | | | |
| | | 334-341, | | | | | |
| | | 349-356, | | | | | |
| | | 376-382, | | | | | |
| | | 384-395 | | | | | |
| MCRH2384 | S. Threonyl- | 4-9, 20-39, | 15-126, | 7 | 172-215, | 91 | 305 |
| | tRNA | 42-48, 67-101, | 129-166, | | 218-291, | | |
| | synthetase | 129-135, | 171-217, | | 417-440, | | |
| | (EC 6.1.1.3) | 156-162, | 227-307, | | 498-574 | | |
| | (Threonine-- | 170-176, | 309-361, | | | | |
| | tRNA ligase | 178-189, | 363-431, | | | | |
| | (ThrRS) - | 192-197, | 461-496, | | | | |
| | Psychrobacters | 228-235, | 501-637 | | | | |
| | (strain | 260-266, | | | | | |
| | PRwf-1) | 272-278, | | | | | |
| | | 291-301, | | | | | |
| | | 330-342, | | | | | |
| | | 347-360, | | | | | |
| | | 367-373, | | | | | |
| | | 383-390, | | | | | |
| | | 397-409, | | | | | |
| | | 432-443, | | | | | |
| | | 466-487, | | | | | |
| | | 506-517, | | | | | |
| | | 520-545, | | | | | |
| | | 551-561, | | | | | |
| | | 588-598, | | | | | |
| | | 602-608, | | | | | |
| | | 622-630 | | | | | |
| MCRH2399 | | 8-28, 34-67 | 1-70 | 2 | 2-32 | 92 | 306 |
| MCRH2415 | Lytic | 9-26, 33-40, | 1-30, 33-99, | 3 | 59-118, | 93 | 307 |
| | transglycosylase, | 79-93, 98-105, | 106-126, | | 160-215 | | |
| | catalytic | 112-121, | 129-331, | | | | |
| | precursor - | 128-137, | 340-511, | | | | |
| | Psychrobacters | 144-156, | 522-565, | | | | |
| | (strain | 160-167, | 578-599, | | | | |
| | PRwf-1) | 183-190, | 608-667 | | | | |
| | | 198-204, | | | | | |
| | | 210-224, | | | | | |
| | | 250-275, | | | | | |
| | | 283-289, | | | | | |
| | | 296-302, | | | | | |
| | | 314-321, | | | | | |
| | | 336-344, | | | | | |
| | | 346-353, | | | | | |
| | | 355-362, | | | | | |
| | | 367-380, | | | | | |
| | | 382-391, | | | | | |
| | | 393-403, | | | | | |
| | | 407-413, | | | | | |
| | | 416-423, | | | | | |
| | | 434-443, | | | | | |
| | | 469-492, | | | | | |
| | | 499-509, | | | | | |
| | | 550-559, | | | | | |
| | | 596-603, | | | | | |
| | | 613-633, | | | | | |
| | | 635-642, | | | | | |
| | | 648-659 | | | | | |
| MCRH2484 | Acetyl- | 7-20, 25-33, | 5-90, 113-250, | 6 | 9-47, 145-198, | 94 | 308 |
| | coenzyme A | 36-64, 74-83, | 260-293 | | 227-239 | | |
| | carboxylase | 117-124, | | | | | |
| | carboxyl | 126-137, | | | | | |
| | transferase | 146-159, | | | | | |
| | subunit alpha - | 164-173, | | | | | |
| | Psychrobacter | 181-186, | | | | | |
| | arcticum | 195-231, | | | | | |
| | | 240-255, | | | | | |
| | | 258-266, | | | | | |
| | | 268-276, | | | | | |
| | | 283-290 | | | | | |
| MCRH2496 | Possible | 4-24, 31-41, | 1-101, 103-140, | 2 | 189-242 | 95 | 309 |
| | Peptidoglycan- | 43-57, 61-68, | 202-263, | | | | |
| | binding | 72-78, | 286-362 | | | | |
| | LysM - | 83-88, 115-121, | | | | | |
| | Psychrobacter | 123-135, | | | | | |
| | arcticum | 190-200, | | | | | |
| | | 214-224, | | | | | |
| | | 239-248, | | | | | |
| | | 291-299, | | | | | |
| | | 305-312, | | | | | |
| | | 328-333, | | | | | |
| | | 351-362 | | | | | |
| MCRH2506 | Msp22 | 4-21, 110-126, | 1-29, 31-62, | 2 | 7-80 | 96 | 310 |
| | (Fragment) - | 128-134, | 65-94, 99-149 | | | | |
| | Moraxella | 139-149 | | | | | |
| | catarrhalis | | | | | | |
| MCRH2519 | S. 1-deoxy- | 4-9, 23-29, | 1-104, 121-135, | 6 | 162-186, | 97 | 311 |
| | D-xylulose-5- | 37-52, 57-73, | 143-176, | | 309-397, | | |
| | phosphate | 80-98, | 182-274, | | 435-463, | | |
| | synthase (EC | 101-119, | 281-301, | | 503-565 | | |
| | 2.2.1.7) (1- | 146-163, | 306-385, | | | | |
| | deoxyxylulose | 175-181, | 393-502, | | | | |
| | 5-phosphate | 198-208, | 505-648, | | | | |
| | synthase) | 222-228, | 654-709 | | | | |
| | (DXP | 243-249, | | | | | |
| | synthase) | 258-263, | | | | | |
| | (DXPS) - | 269-278, | | | | | |
| | Psychrobacter | 283-298, | | | | | |
| | cryohalolentis | 309-324, | | | | | |
| | (strain K5) | 329-339, | | | | | |
| | | 342-353, | | | | | |
| | | 356-363, | | | | | |
| | | 365-374, | | | | | |
| | | 389-395, | | | | | |
| | | 397-404, | | | | | |
| | | 408-415, | | | | | |
| | | 424-429, | | | | | |
| | | 432-450, | | | | | |
| | | 457-490, | | | | | |
| | | 503-524, | | | | | |
| | | 526-556, | | | | | |
| | | 568-575, | | | | | |
| | | 584-592, | | | | | |
| | | 596-619, | | | | | |
| | | 621-646, | | | | | |
| | | 653-673, | | | | | |
| | | 675-694, | | | | | |
| | | 699-706 | | | | | |
| MCRH2553 | S. Cysteinyl- | 5-21, 24-49, | 1-89, 106-125, | 5 | 166-220, | 98 | 312 |
| | tRNA | 51-63, 65-76, | 129-207, | | 369-473 | | |
| | synthetase | 111-117, | 210-230, | | | | |
| | (EC 6.1.1.16) | 133-145, | 255-357, | | | | |
| | (Cysteine-- | 149-156, | 360-453 | | | | |
| | tRNA ligase | 189-197, | | | | | |
| | (CysRS) - | 217-230, | | | | | |
| | Psychrobacter | 240-245, | | | | | |
| | cryohalolentis | 288-295, | | | | | |
| | (strain K5) | 297-316, | | | | | |
| | | 321-335, | | | | | |
| | | 339-346, | | | | | |
| | | 369-382, | | | | | |
| | | 401-421 | | | | | |
| MCRH2560 | Putative | 4-11, 22-37, | 1-51, 59-102 | 2 | 41-100 | 99 | 313 |
| | cytochrome c, | 39-54, 62-70, | | | | | |
| | class I | 78-84, | | | | | |
| | precursor - | 94-100, | | | | | |
| | Psychrobacter | 106-111 | | | | | |
| | cryohalolentis | | | | | | |
| | (strain K5) | | | | | | |
| MCRH2592 | S. Ribonuclease | 16-26, 29-46, | 1-35, 61-81, | 12 | 43-75 | 100 | 314 |
| | PH (EC | 48-54, | 88-116, | | | | |
| | 2.7.7.56) | 94-101, | 139-205, | | | | |
| | (RNase PH) | 103-110, | 207-227 | | | | |
| | (tRN | 117-125, | | | | | |
| | nucleotidyltransferase) - | 134-148, | | | | | |
| | Psychrobacters | 156-180, | | | | | |
| | (strain | 190-196, | | | | | |
| | PRwf-1) | 221-239 | | | | | |
| MCRH2606 | Outer | 5-19, 21-27, | 1-76, 83-155, | 4 | 15-137 | 101 | 315 |
| | membrane | 30-35, 40-57, | 158-191, | | | | |
| | protein G1b - | 67-75, | 218-253 | | | | |
| | Moraxella | 104-114, | | | | | |
| | catarrhalis | 121-130, | | | | | |
| | | 152-161, | | | | | |
| | | 167-175, | | | | | |
| | | 187-205, | | | | | |
| | | 219-227, | | | | | |
| | | 244-250 | | | | | |
| MCRH2612 | Probable | 15-38, 40-49, | 1-83, 85-115, | 3 | 598-632, | 102 | 316 |
| | aminopeptidase | 57-66, | 136-179, | | 690-700, | | |
| | N (EC | 68-76, 80-88, | 192-223, | | 772-833 | | |
| | 3.4.11.2) - | 91-109, | 257-360, | | | | |
| | Psychrobacter | 117-122, | 375-486, | | | | |
| | arcticum | 148-154, | 501-527, | | | | |
| | | 161-169, | 530-618, | | | | |
| | | 195-214, | 626-644, | | | | |
| | | 220-230, | 653-867 | | | | |
| | | 233-241, | | | | | |
| | | 263-269, | | | | | |
| | | 285-293, | | | | | |
| | | 301-312, | | | | | |
| | | 324-340, | | | | | |
| | | 349-367, | | | | | |
| | | 372-386, | | | | | |
| | | 398-407, | | | | | |
| | | 426-434, | | | | | |
| | | 436-443, | | | | | |
| | | 446-452, | | | | | |
| | | 456-476, | | | | | |
| | | 478-498, | | | | | |
| | | 510-517, | | | | | |
| | | 523-550, | | | | | |
| | | 558-565, | | | | | |
| | | 589-604, | | | | | |
| | | 610-619, | | | | | |
| | | 634-639, | | | | | |
| | | 659-668, | | | | | |
| | | 680-688, | | | | | |
| | | 698-704, | | | | | |
| | | 732-739, | | | | | |
| | | 741-754, | | | | | |
| | | 758-767, | | | | | |
| | | 783-796, | | | | | |
| | | 800-812, | | | | | |
| | | 816-826, | | | | | |
| | | 842-860 | | | | | |
| MCRH2625 | Periplasmic | 4-12, 41-49, | 1-68, 71-150, | 6 | 37-125, | 103 | 317 |
| | protein - | 61-66, 111-118, | 193-226, | | 272-341 | | |
| | Neisseria | 123-128, | 230-296, | | | | |
| | meningitidis | 139-144, | 305-406 | | | | |
| | serogroup C | 159-166, | | | | | |
| | (strain | 178-185, | | | | | |
| | 053442) | 206-214, | | | | | |
| | | 236-248, | | | | | |
| | | 262-268, | | | | | |
| | | 275-293, | | | | | |
| | | 297-314, | | | | | |
| | | 348-360, | | | | | |
| | | 368-399 | | | | | |
| MCRH2627 | GDSL-like | 8-15, 18-54, | 17-110, | 5 | 62-107, | 104 | 318 |
| | lipase/ccylhydrolase | 61-80, 109-114, | 118-139, | | 123-182 | | |
| | family protein - | 143-149, | 149-238, | | | | |
| | Pseudomonas | 153-160, | 247-365 | | | | |
| | fluorescens | 172-185, | | | | | |
| | (strain Pf-5/ | 188-194, | | | | | |
| | ATCC BAA- | 196-207, | | | | | |
| | 477) | 221-230, | | | | | |
| | | 238-244, | | | | | |
| | | 273-279, | | | | | |
| | | 291-297, | | | | | |
| | | 305-319, | | | | | |
| | | 325-333, | | | | | |
| | | 342-362 | | | | | |
| MCRH2641 | Putative | 15-28, 34-59, | 1-32, 39-55, | 6 | 50-100, | 105 | 319 |
| | uncharacterized | 105-135, | 76-122, | | 116-176, | | |
| | protein - | 137-144, | 124-279, | | 261-288 | | |
| | Psychrobacter | 155-184, | 282-337 | | | | |
| | cryohalolentis | 187-212, | | | | | |
| | (strain K5) | 221-233, | | | | | |
| | | 240-260, | | | | | |
| | | 267-278, | | | | | |
| | | 286-291, | | | | | |
| | | 299-315, | | | | | |
| | | 319-334 | | | | | |
| MCRH2669 | Cytochrome | 4-22, 43-56, | 1-36, 57-112, | 22 | 4-108 | 106 | 320 |
| | c1 precursor - | 71-108, | 121-181, | | | | |
| | Psychrobacters | 119-125, | 190-241 | | | | |
| | (strain | 127-138, | | | | | |
| | PRwf-1) | 146-155, | | | | | |
| | | 164-171, | | | | | |
| | | 173-181, | | | | | |
| | | 190-199, | | | | | |
| | | 214-234 | | | | | |
| MCRH2682 | S. tRNA | 11-19, 24-31, | 8-273, 283-299, | 22 | 17-74, 155-189, | 107 | 321 |
| | uridine 5- | 37-42, | 309-346, | | 220-302, | | |
| | carboxymethylaminomethyl | 61-71, 85-91, | 367-490, | | 418-540, | | |
| | modification | 94-100, | 494-537, | | 550-612 | | |
| | enzyme gid | 105-115, | 558-632 | | | | |
| | (Glucose- | 123-138, | | | | | |
| | inhibited | 140-148, | | | | | |
| | division | 153-161, | | | | | |
| | protein A) - | 164-173, | | | | | |
| | Psychrobacter | 185-192, | | | | | |
| | arcticum | 194-202, | | | | | |
| | | 212-222, | | | | | |
| | | 227-233, | | | | | |
| | | 244-250, | | | | | |
| | | 276-287, | | | | | |
| | | 298-304, | | | | | |
| | | 309-315, | | | | | |
| | | 319-330, | | | | | |
| | | 342-353, | | | | | |
| | | 367-374, | | | | | |
| | | 387-394, | | | | | |
| | | 403-425, | | | | | |
| | | 439-445, | | | | | |
| | | 514-520, | | | | | |
| | | 528-543, | | | | | |
| | | 545-553, | | | | | |
| | | 569-584, | | | | | |
| | | 586-595, | | | | | |
| | | 603-621 | | | | | |
| MCRH2754 | Probable | 4-20, 41-47, | 1-62, 70-209, | 3 | 140-149, | 108 | 322 |
| | Transcription | 49-56, 68-86, | 217-319 | | 174-233, | | |
| | regulator, | 95-101, | | | 243-300 | | |
| | LysR family - | 108-121, | | | | | |
| | Psychrobacter | 123-137, | | | | | |
| | arcticum | 145-150, | | | | | |
| | | 158-178, | | | | | |
| | | 187-198, | | | | | |
| | | 218-226, | | | | | |
| | | 231-237, | | | | | |
| | | 240-250, | | | | | |
| | | 252-262, | | | | | |
| | | 269-282, | | | | | |
| | | 287-317 | | | | | |
| MCRH2759 | 4Fe—4S | 16-21, 29-36, | 1-15, 19-260, | 16 | 242-272, | 109 | 323 |
| | ferredoxin, | 43-61, | 292-312, | | 435-457 | | |
| | iron-sulfur | 68-84, 89-136, | 314-451, | | | | |
| | binding - | 159-197, | 465-483 | | | | |
| | Psychrobacter | 206-216, | | | | | |
| | cryohalolentis | 224-240, | | | | | |
| | (strain K5) | 244-251, | | | | | |
| | | 270-286, | | | | | |
| | | 292-307, | | | | | |
| | | 313-323, | | | | | |
| | | 327-332, | | | | | |
| | | 339-364, | | | | | |
| | | 388-395, | | | | | |
| | | 402-409, | | | | | |
| | | 423-440, | | | | | |
| | | 448-461, | | | | | |
| | | 464-476 | | | | | |
| MCRH2783 | Cytochrome c | 8-28, 30-35, | 1-40, 44-96, | 2 | 158-168, | 110 | 324 |
| | oxidase cbb3- | 55-64, 69-79, | 103-154, | | 286-334 | | |
| | type, subunit | 87-95, | 158-177, | | | | |
| | III (EC | 132-143, | 181-202, | | | | |
| | 1.9.3.1) - | 161-177, | 208-268, | | | | |
| | Psychrobacter | 186-198, | 272-355 | | | | |
| | arcticum | 222-227, | | | | | |
| | | 247-258, | | | | | |
| | | 266-288, | | | | | |
| | | 340-352 | | | | | |
| MCRH2844 | Oligopeptide- | 5-24, 39-46, | 1-33, 35-108, | 6 | 162-181, | 111 | 325 |
| | binding | 50-64, 79-89, | 118-236, | | 331-422, | | |
| | protein oppA - | 103-109, | 245-260, | | 481-534, | | |
| | Streptococcus | 116-133, | 264-324, | | 591-669 | | |
| | pyogenes | 137-150, | 329-358, | | | | |
| | serotype M2 | 159-167, | 360-397, | | | | |
| | (strain | 169-177, | 448-485, | | | | |
| | MGAS10270) | 184-202, | 492-536, | | | | |
| | | 209-229, | 541-599, | | | | |
| | | 245-254, | 607-669 | | | | |
| | | 272-282, | | | | | |
| | | 294-301, | | | | | |
| | | 340-356, | | | | | |
| | | 368-378, | | | | | |
| | | 388-395, | | | | | |
| | | 429-444, | | | | | |
| | | 450-463, | | | | | |
| | | 484-490, | | | | | |
| | | 536-545, | | | | | |
| | | 547-557, | | | | | |
| | | 565-601, | | | | | |
| | | 615-627, | | | | | |
| | | 648-655 | | | | | |
| MCRH2851 | Putative | 26-55, 58-73, | 6-151 | 3 | 15-96 | 112 | 326 |
| | uncharacterized | 75-81, | | | | | |
| | protein - | 87-96, 131-140, | | | | | |
| | Psychrobacters | 150-158 | | | | | |
| | (strain | | | | | | |
| | PRwf-1) | | | | | | |
| MCRH2861 | S. Leucyl- | 4-9, 43-52, | 27-88, 90-173, | 18 | 24-123, | 113 | 327 |
| | tRNA | 63-71, 97-104, | 176-283, | | 243-316, | | |
| | synthetase | 117-125, | 303-404, | | 430-472, | | |
| | (EC 6.1.1.4) | 130-136, | 421-443, | | 512-571 | | |
| | (Leucine-- | 143-161, | 473-487, | | | | |
| | tRNA ligase) | 167-179, | 507-540, | | | | |
| | (LeuRS) - | 185-191, | 544-642, | | | | |
| | Psychrobacter | 194-201, | 645-673, | | | | |
| | cryohalolentis | 205-211, | 677-761, | | | | |
| | (strain K5) | 219-225, | 767-840, | | | | |
| | | 240-245, | 843-878 | | | | |
| | | 247-256, | | | | | |
| | | 261-279, | | | | | |
| | | 286-301, | | | | | |
| | | 323-338, | | | | | |
| | | 340-349, | | | | | |
| | | 359-370, | | | | | |
| | | 390-397, | | | | | |
| | | 399-414, | | | | | |
| | | 439-473, | | | | | |
| | | 485-496, | | | | | |
| | | 505-521, | | | | | |
| | | 534-561, | | | | | |
| | | 566-571, | | | | | |
| | | 575-588, | | | | | |
| | | 598-606, | | | | | |
| | | 623-629, | | | | | |
| | | 653-665, | | | | | |
| | | 675-680, | | | | | |
| | | 683-690, | | | | | |
| | | 692-700, | | | | | |
| | | 730-755, | | | | | |
| | | 769-798, | | | | | |
| | | 802-815, | | | | | |
| | | 818-826, | | | | | |
| | | 852-859, | | | | | |
| | | 862-875 | | | | | |
| MCRH2874 | Sulfatase | 40-55, 59-119, | 1-336, 344-379, | 4 | 230-331, | 114 | 328 |
| | domain | 145-180, | 395-438, | | 454-460 | | |
| | protein - | 182-210, | 440-457, | | | | |
| | Dichelobacter | 215-230, | 476-571 | | | | |
| | nodosus | 264-274, | | | | | |
| | (strain | 293-305, | | | | | |
| | VCS1703A) | 308-314, | | | | | |
| | | 316-328, | | | | | |
| | | 339-346, | | | | | |
| | | 348-354, | | | | | |
| | | 388-393, | | | | | |
| | | 395-414, | | | | | |
| | | 416-425, | | | | | |
| | | 431-436, | | | | | |
| | | 442-451, | | | | | |
| | | 467-473, | | | | | |
| | | 477-487, | | | | | |
| | | 491-498, | | | | | |
| | | 505-513, | | | | | |
| | | 519-542, | | | | | |
| | | 548-565 | | | | | |
| MCRH2891 | Na+ | 5-24, 32-46, | 1-321, 323-344, | 3 | 341-374, | 115 | 329 |
| | symporter - | 72-77, 83-98, | 353-371, | | 406-416 | | |
| | Marinomonass | 100-106, | 374-588 | | | | |
| | (strain | 113-135, | | | | | |
| | MWYL1) | 140-150, | | | | | |
| | | 154-170, | | | | | |
| | | 176-199, | | | | | |
| | | 218-240, | | | | | |
| | | 259-278, | | | | | |
| | | 282-301, | | | | | |
| | | 307-323, | | | | | |
| | | 379-386, | | | | | |
| | | 389-430, | | | | | |
| | | 449-457, | | | | | |
| | | 465-484, | | | | | |
| | | 504-520, | | | | | |
| | | 537-561, | | | | | |
| | | 568-581 | | | | | |
| MCRH2904 | Glycine | 11-20, 27-37, | 3-31, 36-63, | 9 | 293-326, | 116 | 330 |
| | dehydrogenase | 39-54, | 66-80, 103-208, | | 691-787, | | |
| | (Decarboxylating) | 67-73, 79-89, | 231-299, | | 896-950 | | |
| | beta | 92-102, | 307-399, | | | | |
| | subunit/ | 112-120, | 445-517, | | | | |
| | glycine | 125-138, | 528-586, | | | | |
| | dehydrogenase | 145-152, | 597-618, | | | | |
| | (Decarboxylating) | 172-178, | 632-652, | | | | |
| | alpha | 181-191, | 661-742, | | | | |
| | subunit (EC | 193-204, | 745-781, | | | | |
| | 1.4.4.2) - | 213-220, | 785-852, | | | | |
| | Psychrobacters | 222-235, | 855-893, | | | | |
| | (strain | 241-257, | 909-947 | | | | |
| | PRwf-1) | 281-288, | | | | | |
| | | 298-306, | | | | | |
| | | 331-359, | | | | | |
| | | 361-403, | | | | | |
| | | 420-426, | | | | | |
| | | 434-456, | | | | | |
| | | 462-470, | | | | | |
| | | 477-484, | | | | | |
| | | 497-504, | | | | | |
| | | 520-527, | | | | | |
| | | 535-548, | | | | | |
| | | 566-575, | | | | | |
| | | 584-592, | | | | | |
| | | 606-613, | | | | | |
| | | 624-629, | | | | | |
| | | 635-651, | | | | | |
| | | 654-660, | | | | | |
| | | 683-694, | | | | | |
| | | 697-703, | | | | | |
| | | 714-725, | | | | | |
| | | 728-757, | | | | | |
| | | 767-779, | | | | | |
| | | 787-794, | | | | | |
| | | 801-814, | | | | | |
| | | 834-843, | | | | | |
| | | 858-867, | | | | | |
| | | 869-875, | | | | | |
| | | 888-899, | | | | | |
| | | 912-933, | | | | | |
| | | 936-946 | | | | | |
| MCRH2916 | S. Aminomethyl | 4-21, 29-46, | 1-88 | 1 | 24-78 | 117 | 331 |
| | transferase | 61-77, 81-88 | | | | | |
| | (EC 2.1.2.10) | | | | | | |
| | (Glycine | | | | | | |
| | cleavage | | | | | | |
| | system | | | | | | |
| | protein) - | | | | | | |
| | Neisseria | | | | | | |
| | meningitidis | | | | | | |
| | serogroup B | | | | | | |
| MCRH2935 | Putative | 8-41, 48-53, | 1-49, 69-149, | 4 | 39-67, 77-105 | 118 | 332 |
| | lipoprotein - | 73-78, 81-98, | 161-227, | | | | |
| | Bordetella | 115-140, | 230-306 | | | | |
| | petrii (strain | 143-149, | | | | | |
| | ATCC BAA- | 154-162, | | | | | |
| | 461/DSM | 182-196, | | | | | |
| | 12804/ | 207-215, | | | | | |
| | CCUG | 221-226, | | | | | |
| | 43448) | 230-239, | | | | | |
| | | 257-264, | | | | | |
| | | 268-276, | | | | | |
| | | 287-303 | | | | | |
| MCRH3006 | Aspartate | 4-11, 16-23, | 1-51, 93-245, | 6 | 3-9, 107-183, | 119 | 333 |
| | semialdehyde | 31-39, 64-79, | 259-377 | | 210-318 | | |
| | dehydrogenase | 82-89, | | | | | |
| | (EC | 98-105, | | | | | |
| | 1.2.1.11) - | 111-117, | | | | | |
| | Psychrobacter | 136-146, | | | | | |
| | arcticum | 162-168, | | | | | |
| | | 186-193, | | | | | |
| | | 196-205, | | | | | |
| | | 219-236, | | | | | |
| | | 268-287, | | | | | |
| | | 289-300, | | | | | |
| | | 308-314, | | | | | |
| | | 323-339, | | | | | |
| | | 349-365, | | | | | |
| | | 368-374 | | | | | |
| MCRH3022 | Probable | 4-28, 35-48, | 1-26, 54-136, | 2 | 14-88 | 120 | 334 |
| | cytochrome | 56-64, 91-125, | 144-167 | | | | |
| | C-type | 135-143, | | | | | |
| | biogenesis | 150-159 | | | | | |
| | protein - | | | | | | |
| | Psychrobacter | | | | | | |
| | arcticum | | | | | | |
| MCRH3030 | Putative | 4-16, 21-39, | 1-153, 178-240, | 4 | 79-169, | 121 | 335 |
| | uncharacterized | 53-83, 88-93, | 254-282, | | 194-251, | | |
| | protein - | 99-133, | 284-349, | | 451-509 | | |
| | Psychrobacter | 152-164, | 366-446, | | | | |
| | arcticum | 167-187, | 450-784, | | | | |
| | | 192-209, | 794-813 | | | | |
| | | 211-231, | | | | | |
| | | 245-273, | | | | | |
| | | 278-284, | | | | | |
| | | 289-304, | | | | | |
| | | 317-333, | | | | | |
| | | 335-341, | | | | | |
| | | 346-353, | | | | | |
| | | 359-366, | | | | | |
| | | 378-389, | | | | | |
| | | 394-402, | | | | | |
| | | 424-438, | | | | | |
| | | 447-460, | | | | | |
| | | 473-480, | | | | | |
| | | 482-492, | | | | | |
| | | 494-500, | | | | | |
| | | 506-520, | | | | | |
| | | 523-541, | | | | | |
| | | 558-574, | | | | | |
| | | 577-588, | | | | | |
| | | 598-605, | | | | | |
| | | 611-619, | | | | | |
| | | 622-629, | | | | | |
| | | 633-643, | | | | | |
| | | 649-669, | | | | | |
| | | 685-701, | | | | | |
| | | 707-727, | | | | | |
| | | 735-749, | | | | | |
| | | 768-780, | | | | | |
| | | 783-789, | | | | | |
| | | 798-810 | | | | | |
| MCRH3040 | Putative | 4-30, 38-46, | 1-52, 64-78, | 4 | 25-108, | 122 | 336 |
| | uncharacterized | 56-70, 80-90, | 81-202, | | 505-560 | | |
| | protein - | 101-110, | 221-297, | | | | |
| | Psychrobacter | 117-123, | 335-381, | | | | |
| | arcticum | 149-157, | 384-454, | | | | |
| | | 162-172, | 464-552, | | | | |
| | | 178-191, | 559-590, | | | | |
| | | 211-218, | 598-620, | | | | |
| | | 230-256, | 622-644, | | | | |
| | | 261-283, | 646-668, | | | | |
| | | 292-310, | 672-821, | | | | |
| | | 335-344, | 833-898 | | | | |
| | | 348-354, | | | | | |
| | | 361-369, | | | | | |
| | | 382-396, | | | | | |
| | | 403-414, | | | | | |
| | | 425-431, | | | | | |
| | | 452-458, | | | | | |
| | | 460-472, | | | | | |
| | | 484-504, | | | | | |
| | | 508-514, | | | | | |
| | | 524-541, | | | | | |
| | | 562-580, | | | | | |
| | | 597-603, | | | | | |
| | | 627-643, | | | | | |
| | | 645-657, | | | | | |
| | | 688-696, | | | | | |
| | | 707-713, | | | | | |
| | | 719-736, | | | | | |
| | | 746-759, | | | | | |
| | | 769-775, | | | | | |
| | | 791-797, | | | | | |
| | | 802-812, | | | | | |
| | | 824-830, | | | | | |
| | | 838-847, | | | | | |
| | | 856-864, | | | | | |
| | | 880-901, | | | | | |
| | | 909-916 | | | | | |
| MCRH3120 | 2- | 16-24, 37-46, | 7-44, 51-79, | 11 | 126-230, | 123 | 337 |
| | isopropylmalate | 60-73, | 81-114, | | 248-286, | | |
| | synthase - | 79-90, 97-116, | 116-263, | | 364-508, | | |
| | Psychrobacter | 130-141, | 285-307, | | 510-517 | | |
| | cryohalolentis | 143-150, | 311-351, | | | | |
| | (strain K5) | 155-161, | 379-416, | | | | |
| | | 179-186, | 427-482, | | | | |
| | | 193-206, | 491-509, | | | | |
| | | 212-225, | 535-570 | | | | |
| | | 230-253, | | | | | |
| | | 258-267, | | | | | |
| | | 290-296, | | | | | |
| | | 306-344, | | | | | |
| | | 366-381, | | | | | |
| | | 383-390, | | | | | |
| | | 398-405, | | | | | |
| | | 418-425, | | | | | |
| | | 438-449, | | | | | |
| | | 465-482, | | | | | |
| | | 489-499, | | | | | |
| | | 503-509, | | | | | |
| | | 530-543, | | | | | |
| | | 545-567 | | | | | |
| MCRH3128 | UspA1 - | 4-10, 13-21, | 1-19, 24-55, | 43 | 37-262, | 124 | 338 |
| | Moraxella | 27-40, 90-95, | 88-108, | | 272-351, | | |
| | catarrhalis | 121-128, | 118-153, | | 453-474, | | |
| | | 197-203, | 172-190, | | 499-518, | | |
| | | 239-246, | 198-281, | | 527-547, | | |
| | | 253-259, | 299-361, | | 569-643, | | |
| | | 305-311, | 369-392, | | 897-954 | | |
| | | 322-336, | 430-578, | | | | |
| | | 349-356, | 661-689, | | | | |
| | | 358-364, | 698-738, | | | | |
| | | 372-379, | 795-850, | | | | |
| | | 393-408, | 861-901, | | | | |
| | | 411-417, | 904-924, | | | | |
| | | 427-434, | 927-946 | | | | |
| | | 457-467, | | | | | |
| | | 481-490, | | | | | |
| | | 492-497, | | | | | |
| | | 504-513, | | | | | |
| | | 533-542, | | | | | |
| | | 561-571, | | | | | |
| | | 592-600, | | | | | |
| | | 641-646, | | | | | |
| | | 661-667, | | | | | |
| | | 671-682, | | | | | |
| | | 711-720, | | | | | |
| | | 722-734, | | | | | |
| | | 763-771, | | | | | |
| | | 779-796, | | | | | |
| | | 833-838, | | | | | |
| | | 855-865, | | | | | |
| | | 873-879, | | | | | |
| | | 886-896, | | | | | |
| | | 901-908, | | | | | |
| | | 913-924, | | | | | |
| | | 931-939 | | | | | |
| MCRH3146 | Putative | 22-28, 39-49 | 4-20, 26-44 | 4 | 5-65 | 125 | 339 |
| | uncharacterized | | | | | | |
| | protein - | | | | | | |
| | Alteromonadales | | | | | | |
| | bacterium | | | | | | |
| | TW-7 | | | | | | |
| MCRH3327 | DsrE-like | 4-39, 52-63, | 1-88, 94-125 | 2 | 56-113 | 126 | 340 |
| | protein - | 70-88, 97-112 | | | | | |
| | Psychrobacter | | | | | | |
| | cryohalolentis | | | | | | |
| | (strain K5) | | | | | | |
| MCRH3328 | Glutamate- | 10-29, 35-40, | 1-30, 35-106, | 5 | 231-286, | 127 | 341 |
| | ammonia- | 46-62, | 117-348, | | 394-429, | | |
| | ligase | 77-84, 94-129, | 357-381, | | 686-758 | | |
| | adenylyltransferase | 146-153, | 390-551, | | | | |
| | (EC | 158-164, | 553-800, | | | | |
| | 2.7.7.42) - | 166-174, | 804-835, | | | | |
| | Psychrobacter | 196-202, | 844-882, | | | | |
| | cryohalolentis | 209-215, | 893-937 | | | | |
| | (strain K5) | 225-240, | | | | | |
| | | 250-258, | | | | | |
| | | 272-287, | | | | | |
| | | 305-313, | | | | | |
| | | 318-335, | | | | | |
| | | 339-353, | | | | | |
| | | 362-381, | | | | | |
| | | 384-390, | | | | | |
| | | 395-424, | | | | | |
| | | 439-452, | | | | | |
| | | 454-463, | | | | | |
| | | 467-476, | | | | | |
| | | 482-496, | | | | | |
| | | 504-529, | | | | | |
| | | 535-562, | | | | | |
| | | 564-573, | | | | | |
| | | 576-588, | | | | | |
| | | 596-602, | | | | | |
| | | 604-619, | | | | | |
| | | 625-658, | | | | | |
| | | 664-675, | | | | | |
| | | 685-696, | | | | | |
| | | 714-727, | | | | | |
| | | 746-758, | | | | | |
| | | 770-777, | | | | | |
| | | 780-789, | | | | | |
| | | 793-799, | | | | | |
| | | 845-861, | | | | | |
| | | 863-873, | | | | | |
| | | 890-901, | | | | | |
| | | 905-910, | | | | | |
| | | 921-934 | | | | | |
| MCRH3363 | Aminotransferase | 8-31, 35-70, | 5-104, 122-260, | 3 | 106-129, | 128 | 342 |
| | (EC | 83-89, 91-102, | 271-340, | | 215-224, | | |
| | 2.6.1. -) - | 108-116, | 353-564, | | 454-522 | | |
| | Psychrobacters | 130-156, | 566-603 | | | | |
| | (strain | 169-191, | | | | | |
| | PRwf-1) | 203-217, | | | | | |
| | | 238-256, | | | | | |
| | | 270-292, | | | | | |
| | | 298-311, | | | | | |
| | | 315-331, | | | | | |
| | | 335-345, | | | | | |
| | | 364-370, | | | | | |
| | | 376-382, | | | | | |
| | | 384-401, | | | | | |
| | | 405-419, | | | | | |
| | | 421-430, | | | | | |
| | | 434-441, | | | | | |
| | | 445-452, | | | | | |
| | | 467-481, | | | | | |
| | | 503-511, | | | | | |
| | | 516-522, | | | | | |
| | | 524-531, | | | | | |
| | | 534-539, | | | | | |
| | | 547-560, | | | | | |
| | | 570-582 | | | | | |
| MCRH3380 | Carbamoyl- | 8-27, 29-37, | 1-68, 84-100, | 8 | 155-209, | 129 | 343 |
| | phosphate | 42-49, 63-69, | 152-182, | | 427-501, | | |
| | synthase, | 74-80, | 198-344, | | 658-688, | | |
| | large subunit | 95-118, | 348-413, | | 809-841, | | |
| | (EC 6.3.5.5) - | 140-148, | 416-552, | | 862-871, | | |
| | Acinetobacter | 156-170, | 558-621, | | 927-1010 | | |
| | baumannii | 189-195, | 624-788, | | | | |
| | | 197-209, | 800-892, | | | | |
| | | 218-223, | 958-1060, | | | | |
| | | 227-235, | 1064-1078 | | | | |
| | | 247-255, | | | | | |
| | | 268-275, | | | | | |
| | | 294-299, | | | | | |
| | | 305-313, | | | | | |
| | | 316-333, | | | | | |
| | | 347-359, | | | | | |
| | | 369-376, | | | | | |
| | | 381-386, | | | | | |
| | | 399-410, | | | | | |
| | | 423-432, | | | | | |
| | | 436-455, | | | | | |
| | | 462-475, | | | | | |
| | | 524-537, | | | | | |
| | | 578-588, | | | | | |
| | | 597-605, | | | | | |
| | | 616-622, | | | | | |
| | | 624-634, | | | | | |
| | | 636-644, | | | | | |
| | | 648-655, | | | | | |
| | | 657-665, | | | | | |
| | | 693-698, | | | | | |
| | | 706-723, | | | | | |
| | | 726-732, | | | | | |
| | | 736-778, | | | | | |
| | | 782-805, | | | | | |
| | | 820-832, | | | | | |
| | | 835-846, | | | | | |
| | | 848-870, | | | | | |
| | | 882-909, | | | | | |
| | | 927-933, | | | | | |
| | | 951-957, | | | | | |
| | | 962-971, | | | | | |
| | | 976-982, | | | | | |
| | | 986-1001, | | | | | |
| | | 1016-1021, | | | | | |
| | | 1042-1050, | | | | | |
| | | 1054-1061, | | | | | |
| | | 1066-1075 | | | | | |
| MCRH3399 | Peptidase | 15-36, 55-67, | 2-36, 52-72, | 9 | 21-78, 90-154, | 130 | 344 |
| | M23B | 70-76, | 82-152, | | 168-215 | | |
| | precursor - | 81-88, 110-125, | 156-188, | | | | |
| | Psychrobacter | 128-134, | 191-225, | | | | |
| | cryohalolentis | 136-188, | 232-322 | | | | |
| | (strain K5) | 197-214, | | | | | |
| | | 216-223, | | | | | |
| | | 244-250, | | | | | |
| | | 257-263, | | | | | |
| | | 265-280, | | | | | |
| | | 300-306, | | | | | |
| | | 311-319 | | | | | |
| MCRH3401 | PpiC-type | 4-25, 32-41, | 1-120, 126-160, | 2 | 8-56, 181-269 | 131 | 345 |
| | peptidyl- | 51-58, 71-78, | 173-257, | | | | |
| | prolyl cis- | 81-89, | 266-313, | | | | |
| | trans | 101-123, | 322-342, | | | | |
| | isomerase | 130-138, | 354-434 | | | | |
| | precursor - | 140-151, | | | | | |
| | Psychrobacter | 165-171, | | | | | |
| | cryohalolentis | 176-193, | | | | | |
| | (strain K5) | 202-214, | | | | | |
| | | 244-259, | | | | | |
| | | 266-282, | | | | | |
| | | 285-293, | | | | | |
| | | 295-301, | | | | | |
| | | 316-325, | | | | | |
| | | 329-334, | | | | | |
| | | 344-350, | | | | | |
| | | 381-390, | | | | | |
| | | 405-415, | | | | | |
| | | 423-431 | | | | | |
| MCRH3404 | S. LPS- | 4-46, 53-60, | 1-91, 114-128, | 14 | 103-238, | 132 | 346 |
| | assembly | 74-86, 97-104, | 130-149, | | 247-273, | | |
| | protein | 121-128, | 156-190, | | 451-470, | | |
| | precursor | 149-160, | 207-306, | | 687-734, | | |
| | (Organic | 206-217, | 308-330, | | 753-796 | | |
| | solvent | 252-258, | 342-429, | | | | |
| | tolerance | 274-280, | 436-450, | | | | |
| | protein) - | 287-294, | 454-662, | | | | |
| | Psychrobacter | 311-327, | 666-937 | | | | |
| | cryohalolentis | 356-370, | | | | | |
| | (strain K5) | 378-383, | | | | | |
| | | 394-403, | | | | | |
| | | 425-432, | | | | | |
| | | 434-447, | | | | | |
| | | 473-484, | | | | | |
| | | 491-502, | | | | | |
| | | 543-556 | | | | | |
| | | 599-608 | | | | | |
| | | 610-623, | | | | | |
| | | 641-657, | | | | | |
| | | 671-684, | | | | | |
| | | 698-707, | | | | | |
| | | 719-733, | | | | | |
| | | 748-758, | | | | | |
| | | 772-779, | | | | | |
| | | 798-808, | | | | | |
| | | 814-820, | | | | | |
| | | 830-843, | | | | | |
| | | 854-866, | | | | | |
| | | 872-884, | | | | | |
| | | 891-899, | | | | | |
| | | 901-907, | | | | | |
| | | 920-932 | | | | | |
| MCRH3409 | Aminoglycoside | 35-41, 52-58, | 4-104, 112-131, | 5 | 36-58, 282-336 | 133 | 347 |
| | phosphotransferase - | 66-74, | 150-214, | | | | |
| | Psychrobacter | 78-87, 92-99, | 216-345 | | | | |
| | cryohalolentis | 101-109, | | | | | |
| | (strain K5) | 120-132, | | | | | |
| | | 153-164, | | | | | |
| | | 176-182, | | | | | |
| | | 186-194, | | | | | |
| | | 208-238, | | | | | |
| | | 246-262, | | | | | |
| | | 272-284, | | | | | |
| | | 291-311, | | | | | |
| | | 317-322, | | | | | |
| | | 328-343 | | | | | |
| MCRH3501 | Phospholipase | 5-27, 29-42, | 1-35, 53-118, | 4 | 22-120 | 134 | 348 |
| | D/Transphosphatidylase - | 57-71, 73-80, | 123-280, | | | | |
| | Psychrobacters | 92-99, | 283-440, | | | | |
| | (strain | 101-107, | 442-542 | | | | |
| | PRwf-1) | 126-136, | | | | | |
| | | 142-151, | | | | | |
| | | 155-163, | | | | | |
| | | 173-179, | | | | | |
| | | 214-232, | | | | | |
| | | 235-254, | | | | | |
| | | 262-274, | | | | | |
| | | 297-309, | | | | | |
| | | 311-323, | | | | | |
| | | 330-358, | | | | | |
| | | 362-379, | | | | | |
| | | 383-394, | | | | | |
| | | 396-416, | | | | | |
| | | 432-457, | | | | | |
| | | 464-472, | | | | | |
| | | 474-485, | | | | | |
| | | 487-498, | | | | | |
| | | 511-519, | | | | | |
| | | 527-536 | | | | | |
| MCRH3534 | ABC | 4-15, 27-61, | 1-149, 151-408, | 4 | 324-391 | 135 | 349 |
| | transporter | 64-77, 84-97, | 442-594 | | | | |
| | related - | 102-122, | | | | | |
| | Psychrobacters | 144-215, | | | | | |
| | (strain | 223-239, | | | | | |
| | PRwf-1) | 242-252, | | | | | |
| | | 257-263, | | | | | |
| | | 271-286, | | | | | |
| | | 295-302, | | | | | |
| | | 312-324, | | | | | |
| | | 328-348, | | | | | |
| | | 380-400, | | | | | |
| | | 403-411, | | | | | |
| | | 417-428, | | | | | |
| | | 434-440, | | | | | |
| | | 444-451, | | | | | |
| | | 453-467, | | | | | |
| | | 485-496, | | | | | |
| | | 522-538, | | | | | |
| | | 540-545, | | | | | |
| | | 552-560, | | | | | |
| | | 566-577, | | | | | |
| | | 582-588 | | | | | |
| MCRH3547 | Putative | 21-41, 43-123, | 1-437 | 6 | 84-149, | 136 | 350 |
| | uncharacterized | 125-137, | | | 163-176, | | |
| | protein | 139-157, | | | 260-321 | | |
| | PM0287 - | 171-190, | | | | | |
| | Pasteurella | 193-203, | | | | | |
| | multocida | 205-226, | | | | | |
| | | 242-256, | | | | | |
| | | 264-274, | | | | | |
| | | 289-299, | | | | | |
| | | 301-311, | | | | | |
| | | 323-368, | | | | | |
| | | 375-396, | | | | | |
| | | 400-408, | | | | | |
| | | 418-434 | | | | | |
| MCRH3567 | Nucleoside- | 4-11, 19-34, | 1-65, 81-124, | 1 | 157-215 | 137 | 351 |
| | diphosphate- | 44-65, 70-115, | 127-206, | | | | |
| | sugar | 130-140, | 215-232 | | | | |
| | epimerase- | 142-168, | | | | | |
| | like protein - | 170-176, | | | | | |
| | Psychrobacters | 185-206, | | | | | |
| | (strain | 221-227 | | | | | |
| | PRwf-1) | | | | | | |
| MCRH3578 | DNA gyrase | 4-19, 44-51, | 1-15, 21-119, | 11 | 77-182 | 138 | 352 |
| | subunit A | 66-104, | 123-213 | | | | |
| | (EC 5.99.1.3) - | 122-129, | | | | | |
| | Psychrobacters | 136-141, | | | | | |
| | (strain | 143-150, | | | | | |
| | PRwf-1) | 154-159, | | | | | |
| | | 166-173, | | | | | |
| | | 181-205, | | | | | |
| | | 207-218 | | | | | |
| MCRH3622 | L-serine | 4-15, 17-34, | 1-76, 82-168, | 4 | 234-319 | 139 | 353 |
| | dehydratase 1 | 40-51, 61-71, | 179-209, | | | | |
| | (EC 4.3.1.17) - | 84-89, | 227-249, | | | | |
| | Psychrobacters | 137-146, | 253-473 | | | | |
| | (strain | 153-159, | | | | | |
| | PRwf-1) | 163-170, | | | | | |
| | | 175-191, | | | | | |
| | | 203-210, | | | | | |
| | | 216-228, | | | | | |
| | | 242-250, | | | | | |
| | | 259-271, | | | | | |
| | | 279-284, | | | | | |
| | | 291-329, | | | | | |
| | | 333-372, | | | | | |
| | | 376-394, | | | | | |
| | | 399-404, | | | | | |
| | | 406-412, | | | | | |
| | | 416-424, | | | | | |
| | | 446-451 | | | | | |
| MCRH3635 | Alanine | 8-15, 17-26, | 1-47, 68-99, | 9 | 135-280 | 140 | 354 |
| | racemase (EC | 30-45, 47-74, | 104-174, | | | | |
| | 5.1.1.1) - | 80-92, | 178-378 | | | | |
| | Psychrobacter | 94-111, | | | | | |
| | cryohalolentis | 114-120, | | | | | |
| | (strain K5) | 124-133, | | | | | |
| | | 148-173, | | | | | |
| | | 175-181, | | | | | |
| | | 183-196, | | | | | |
| | | 198-208, | | | | | |
| | | 212-231, | | | | | |
| | | 238-244, | | | | | |
| | | 248-262, | | | | | |
| | | 266-285, | | | | | |
| | | 290-302, | | | | | |
| | | 308-317, | | | | | |
| | | 327-332, | | | | | |
| | | 334-341, | | | | | |
| | | 346-355, | | | | | |
| | | 357-365, | | | | | |
| | | 373-380 | | | | | |
| MCRH3705 | Na+/H+ | 12-28, 32-56, | 1-224, 229-283, | 1 | 350-406 | 141 | 355 |
| | antiporter | 61-72, | 296-464 | | | | |
| | NhaC - | 74-89, 95-128, | | | | | |
| | Psychrobacter | 130-144, | | | | | |
| | cryohalolentis | 150-163, | | | | | |
| | (strain K5) | 177-189, | | | | | |
| | | 196-214, | | | | | |
| | | 218-282, | | | | | |
| | | 294-305, | | | | | |
| | | 313-382, | | | | | |
| | | 384-398, | | | | | |
| | | 404-420, | | | | | |
| | | 426-454, | | | | | |
| | | 456-461 | | | | | |
| MCRH3709 | Peptidase | 6-17, 22-31, | 1-28, 30-82, | 47 | 5-136, 172-260 | 142 | 356 |
| | S11, D- | 35-63, 67-85, | 86-267, | | | | |
| | alanyl-D- | 89-101, | 271-307, | | | | |
| | alanine | 128-147, | 310-376 | | | | |
| | carboxypeptidase 1 | 149-155, | | | | | |
| | precursor - | 161-170, | | | | | |
| | Psychrobacters | 172-179, | | | | | |
| | (strain | 187-198, | | | | | |
| | PRwf-1) | 228-234, | | | | | |
| | | 240-247, | | | | | |
| | | 284-291, | | | | | |
| | | 298-308, | | | | | |
| | | 326-337, | | | | | |
| | | 344-350, | | | | | |
| | | 357-366 | | | | | |
| MCRH3729 | Probable | 9-32, 36-52, | 1-40, 49-69, | 9 | 297-327, | 143 | 357 |
| | membrane- | 72-90, 149-157, | 72-92, 97-265, | | 539-627, | | |
| | bound lytic | 165-177, | 271-369, | | 712-776 | | |
| | murein | 188-196, | 373-452, | | | | |
| | transglycosylase | 223-233, | 456-476, | | | | |
| | D - | 237-245, | 496-527, | | | | |
| | Psychrobacter | 264-273, | 535-555, | | | | |
| | arcticum | 280-293, | 567-637, | | | | |
| | | 298-307, | 652-819 | | | | |
| | | 309-348, | | | | | |
| | | 352-362, | | | | | |
| | | 366-374, | | | | | |
| | | 381-396, | | | | | |
| | | 405-413, | | | | | |
| | | 416-421, | | | | | |
| | | 428-435, | | | | | |
| | | 438-444, | | | | | |
| | | 449-457, | | | | | |
| | | 464-476, | | | | | |
| | | 491-555, | | | | | |
| | | 579-597, | | | | | |
| | | 602-628, | | | | | |
| | | 646-652, | | | | | |
| | | 663-670, | | | | | |
| | | 674-692, | | | | | |
| | | 739-747, | | | | | |
| | | 762-771, | | | | | |
| | | 779-789, | | | | | |
| | | 809-816 | | | | | |
| MCRH3742 | Putative DNA | 5-16, 21-27, | 1-15, 53-86, | 6 | 107-184, | 144 | 358 |
| | repair protein | 39-46, 60-77, | 89-225, | | 256-311 | | |
| | radA - | 92-104, | 237-320, | | | | |
| | Psychrobacter | 112-118, | 331-398, | | | | |
| | arcticum | 129-136, | 406-467 | | | | |
| | | 141-164, | | | | | |
| | | 167-176, | | | | | |
| | | 178-214, | | | | | |
| | | 220-228, | | | | | |
| | | 234-251, | | | | | |
| | | 284-301, | | | | | |
| | | 303-310, | | | | | |
| | | 315-328, | | | | | |
| | | 336-353, | | | | | |
| | | 362-375, | | | | | |
| | | 380-390, | | | | | |
| | | 393-409, | | | | | |
| | | 411-417, | | | | | |
| | | 430-438, | | | | | |
| | | 448-459, | | | | | |
| | | 461-468 | | | | | |
| MCRH3759 | — | 13-34, 36-42, | 1-38, 41-140 | 3 | 4-89 | 145 | 359 |
| | | 49-62, | | | | | |
| | | 86-92, 124-130, | | | | | |
| | | 132-145 | | | | | |
| MCRH3844 | Putative | 16-22, 45-51, | 1-34, 79-113, | 13 | 108-194, | 146 | 360 |
| | uncharacterized | 80-85, | 129-325, | | 370-410, | | |
| | protein - | 88-108, | 327-360, | | 411-442, | | |
| | Mannheimia | 115-127, | 363-383, | | 956-1046, | | |
| | succiniciproducens | 139-157, | 385-514, | | 1055-1236 | | |
| | (strain | 160-176, | 530-565, | | | | |
| | MBEL55E) | 184-189, | 577-701, | | | | |
| | | 198-204, | 704-941, | | | | |
| | | 227-234, | 944-981, | | | | |
| | | 249-270, | 985-1005, | | | | |
| | | 277-295, | 1012-1032, | | | | |
| | | 314-325, | 1049-1088, | | | | |
| | | 331-337, | 1097-1183, | | | | |
| | | 344-367, | 1188-1320 | | | | |
| | | 397-424, | | | | | |
| | | 432-500, | | | | | |
| | | 512-521, | | | | | |
| | | 524-530, | | | | | |
| | | 555-563, | | | | | |
| | | 569-583, | | | | | |
| | | 586-617, | | | | | |
| | | 622-653, | | | | | |
| | | 661-673, | | | | | |
| | | 679-696, | | | | | |
| | | 710-738, | | | | | |
| | | 754-759, | | | | | |
| | | 764-786, | | | | | |
| | | 793-808, | | | | | |
| | | 813-820, | | | | | |
| | | 831-837, | | | | | |
| | | 844-850, | | | | | |
| | | 864-889, | | | | | |
| | | 891-899, | | | | | |
| | | 912-926, | | | | | |
| | | 961-970, | | | | | |
| | | 975-982, | | | | | |
| | | 1016-1024, | | | | | |
| | | 1027-1034, | | | | | |
| | | 1051-1059, | | | | | |
| | | 1096-1102, | | | | | |
| | | 1134-1147, | | | | | |
| | | 1158-1177, | | | | | |
| | | 1179-1185, | | | | | |
| | | 1188-1215, | | | | | |
| | | 1235-1250, | | | | | |
| | | 1271-1284, | | | | | |
| | | 1308-1315 | | | | | |
| MCRH3884 | Putative | 20-32, 67-73, | 7-94, 98-116, | 5 | 113-132, | 147 | 361 |
| | uncharacterized | 84-91, | 121-196, | | 167-245 | | |
| | protein - | 102-108, | 205-224, | | | | |
| | Mannheimia | 148-163, | 240-254 | | | | |
| | haemolytica | 198-209, | | | | | |
| | PHL213 | 232-237 | | | | | |
| MCRH3895 | Transcriptional | 7-16, 36-43, | 1-77, 97-156, | 23 | 92-164 | 148 | 362 |
| | regulator - | 69-77, 101-114, | 172-215, | | | | |
| | Pseudomonas | 136-150, | 221-240 | | | | |
| | phage F116 | 155-161, | | | | | |
| | | 183-195, | | | | | |
| | | 197-206, | | | | | |
| | | 210-218, | | | | | |
| | | 225-237 | | | | | |
| MCRH3907 | Putative | 17-23, 52-62, | 2-35, 81-179, | 14 | 2-126, 245-300 | 149 | 363 |
| | uncharacterized | 75-87, | 181-264, | | | | |
| | protein - | 107-112, | 267-288, | | | | |
| | Psychrobacters | 120-135, | 292-376 | | | | |
| | (strain | 140-146, | | | | | |
| | PRwf-1) | 170-176, | | | | | |
| | | 188-206, | | | | | |
| | | 210-220, | | | | | |
| | | 228-255, | | | | | |
| | | 273-282, | | | | | |
| | | 304-314, | | | | | |
| | | 324-331, | | | | | |
| | | 344-355, | | | | | |
| | | 363-370 | | | | | |
| MCRH3939 | Possible | 4-9, 11-17, | 1-113, 117-183, | 15 | 63-136, | 150 | 364 |
| | membrane- | 24-85, 89-103, | 186-275, | | 248-305, | | |
| | bound lytic | 114-119, | 294-362, | | 458-466 | | |
| | murein | 126-135, | 370-448, | | | | |
| | transglycosylase - | 151-158, | 468-485 | | | | |
| | Psychrobacter | 169-175, | | | | | |
| | arcticum | 191-203, | | | | | |
| | | 226-237, | | | | | |
| | | 247-256, | | | | | |
| | | 261-266, | | | | | |
| | | 278-283, | | | | | |
| | | 306-316, | | | | | |
| | | 321-331, | | | | | |
| | | 333-340, | | | | | |
| | | 350-358, | | | | | |
| | | 361-392, | | | | | |
| | | 397-408, | | | | | |
| | | 412-419 | | | | | |
| MCRH3966 | Probable | 4-23, 41-47, | 1-39, 43-79, | 5 | 132-199, | 151 | 365 |
| | Insulinase- | 52-59, 62-75, | 88-160, | | 214-286 | | |
| | like | 86-92, | 165-236, | | | | |
| | peptidase, | 98-104, | 241-426, | | | | |
| | family M16 - | 106-112, | 434-470 | | | | |
| | Psychrobacter | 126-143, | | | | | |
| | arcticum | 152-157, | | | | | |
| | | 160-166, | | | | | |
| | | 183-192, | | | | | |
| | | 196-201, | | | | | |
| | | 207-214, | | | | | |
| | | 227-235, | | | | | |
| | | 238-245, | | | | | |
| | | 248-265, | | | | | |
| | | 276-285, | | | | | |
| | | 304-314, | | | | | |
| | | 324-342, | | | | | |
| | | 350-356, | | | | | |
| | | 360-375, | | | | | |
| | | 390-403, | | | | | |
| | | 411-435, | | | | | |
| | | 437-446, | | | | | |
| | | 453-461 | | | | | |
| MCRH3969 | Probable | 8-31, 35-48, | 1-331, 352-386, | 2 | 80-156, | 152 | 366 |
| | Insulinase- | 75-98, 100-106, | 404-488 | | 237-303 | | |
| | like | 128-134, | | | | | |
| | peptidase, | 151-166, | | | | | |
| | family M16 - | 168-177, | | | | | |
| | Psychrobacter | 202-223, | | | | | |
| | arcticum | 252-257, | | | | | |
| | | 265-277, | | | | | |
| | | 288-302, | | | | | |
| | | 306-316, | | | | | |
| | | 371-377, | | | | | |
| | | 385-396, | | | | | |
| | | 408-413, | | | | | |
| | | 429-445, | | | | | |
| | | 472-480 | | | | | |
| MCRH3996 | KpsF/GutQ | 4-10, 22-32, | 1-203, 205-339 | 8 | 31-111, | 153 | 367 |
| | family protein | 39-46, 52-69, | | | 205-228 | | |
| | (EC 5.3.1.13) - | 90-96, | | | | | |
| | Psychrobacters | 104-117, | | | | | |
| | (strain | 126-142, | | | | | |
| | PRwf-1) | 148-161, | | | | | |
| | | 163-174, | | | | | |
| | | 178-195, | | | | | |
| | | 200-210, | | | | | |
| | | 216-222, | | | | | |
| | | 225-236, | | | | | |
| | | 238-246, | | | | | |
| | | 248-265, | | | | | |
| | | 279-285, | | | | | |
| | | 313-322, | | | | | |
| | | 324-336 | | | | | |
| MCRH4056 | Pyruvate | 6-26, 33-63, | 16-83, 126-172, | 14 | 81-97, 197-371, | 154 | 368 |
| | dehydrogenase | 66-74, 125-148, | 175-210, | | 470-500 | | |
| | complex | 153-185, | 245-325, | | | | |
| | dihydrolipoamide | 225-230, | 329-448, | | | | |
| | acetyltransferas | 234-250, | 469-557 | | | | |
| | (EC | 253-278, | | | | | |
| | 2.3.1.61) - | 286-299, | | | | | |
| | Psychrobacters | 312-319, | | | | | |
| | (strain | 335-346, | | | | | |
| | PRwf-1) | 348-361, | | | | | |
| | | 383-401, | | | | | |
| | | 414-419, | | | | | |
| | | 423-430, | | | | | |
| | | 432-440, | | | | | |
| | | 447-454, | | | | | |
| | | 470-478, | | | | | |
| | | 488-508, | | | | | |
| | | 519-533, | | | | | |
| | | 537-554 | | | | | |
| MCRH4147 | SSU | 4-9, 11-32, | 1-73, 112-209, | 11 | 495-559 | 155 | 369 |
| | ribosomal | 44-56, 68-74, | 231-294, | | | | |
| | protein S1P - | 82-98, | 296-314, | | | | |
| | Psychrobacters | 104-109, | 326-381, | | | | |
| | (strain | 131-140, | 388-414, | | | | |
| | PRwf-1) | 144-164, | 423-457, | | | | |
| | | 176-182, | 462-484, | | | | |
| | | 188-194, | 495-514, | | | | |
| | | 206-212, | 522-544, | | | | |
| | | 219-225, | 547-568 | | | | |
| | | 228-235, | | | | | |
| | | 237-244, | | | | | |
| | | 254-271, | | | | | |
| | | 277-287, | | | | | |
| | | 294-302, | | | | | |
| | | 312-318, | | | | | |
| | | 324-331, | | | | | |
| | | 341-350, | | | | | |
| | | 352-358, | | | | | |
| | | 399-405, | | | | | |
| | | 411-419, | | | | | |
| | | 438-447, | | | | | |
| | | 452-459, | | | | | |
| | | 465-470, | | | | | |
| | | 475-484, | | | | | |
| | | 486-506, | | | | | |
| | | 514-523, | | | | | |
| | | 525-532, | | | | | |
| | | 537-543 | | | | | |
| MCRH4174 | ABC | 4-26, 29-36, | 1-36, 40-114, | 7 | 54-144, | 156 | 370 |
| | transporter | 45-52, 57-63, | 125-255, | | 543-627 | | |
| | related - | 68-75, | 266-395, | | | | |
| | Psychrobacters | 77-88, 93-108, | 413-511, | | | | |
| | (strain | 114-120, | 530-557, | | | | |
| | PRwf-1) | 138-143, | 564-583, | | | | |
| | | 148-155, | 605-640 | | | | |
| | | 161-179, | | | | | |
| | | 198-211, | | | | | |
| | | 214-224, | | | | | |
| | | 229-242, | | | | | |
| | | 244-253, | | | | | |
| | | 268-274, | | | | | |
| | | 302-311, | | | | | |
| | | 319-331, | | | | | |
| | | 335-349, | | | | | |
| | | 364-374, | | | | | |
| | | 377-384, | | | | | |
| | | 388-394, | | | | | |
| | | 423-436, | | | | | |
| | | 441-446, | | | | | |
| | | 452-471, | | | | | |
| | | 478-501, | | | | | |
| | | 506-514, | | | | | |
| | | 522-546, | | | | | |
| | | 558-579, | | | | | |
| | | 589-604, | | | | | |
| | | 623-631 | | | | | |
| MCRH4206 | Ribonucleoside- | 5-10, 24-30, | 1-63, 73-369, | 5 | 600-685, | 157 | 371 |
| | diphosphate | 37-53, 62-94, | 371-428, | | 741-753 | | |
| | reductase | 101-111, | 432-454, | | | | |
| | class Ia alpha | 118-125, | 457-567, | | | | |
| | subuni (EC | 145-151, | 573-635, | | | | |
| | 1.17.4.1) - | 156-162, | 655-698, | | | | |
| | Psychrobacters | 164-186, | 707-744 | | | | |
| | (strain | 191-198, | | | | | |
| | PRwf-1) | 204-212, | | | | | |
| | | 224-233, | | | | | |
| | | 244-253, | | | | | |
| | | 263-269, | | | | | |
| | | 277-297, | | | | | |
| | | 304-322, | | | | | |
| | | 334-341, | | | | | |
| | | 355-372, | | | | | |
| | | 379-384, | | | | | |
| | | 393-406, | | | | | |
| | | 412-425, | | | | | |
| | | 427-435, | | | | | |
| | | 437-449, | | | | | |
| | | 461-471, | | | | | |
| | | 483-506, | | | | | |
| | | 515-527, | | | | | |
| | | 535-543, | | | | | |
| | | 546-559, | | | | | |
| | | 562-570, | | | | | |
| | | 576-584, | | | | | |
| | | 588-601, | | | | | |
| | | 640-647, | | | | | |
| | | 651-673, | | | | | |
| | | 681-689, | | | | | |
| | | 712-734 | | | | | |
| MCRH4291 | Chromosome | 13-19, 27-38, | 1-47, 49-66, | 5 | 14-57, 76-167, | 158 | 372 |
| | segregation | 78-87, | 70-96, 102-285, | | 191-245 | | |
| | DNA-binding | 105-129, | 287-322, | | | | |
| | protein - | 134-142, | 330-346 | | | | |
| | Psychrobacter | 151-179, | | | | | |
| | arcticum | 184-197, | | | | | |
| | | 206-214, | | | | | |
| | | 225-235, | | | | | |
| | | 246-265, | | | | | |
| | | 274-314, | | | | | |
| | | 322-330, | | | | | |
| | | 334-343 | | | | | |
| MCRH4304 | Putative | 15-21, 26-45, | 1-64, 73-192, | 5 | 86-169, | 159 | 373 |
| | uncharacterized | 49-60, | 209-327, | | 318-384, | | |
| | protein - | 62-69, 77-87, | 329-418, | | 502-520, | | |
| | Psychrobacter | 96-104, | 421-529, | | 529-602 | | |
| | arcticum | 108-114, | 534-586, | | | | |
| | | 117-130, | 599-646, | | | | |
| | | 135-144, | 650-682, | | | | |
| | | 149-160, | 703-793 | | | | |
| | | 174-181, | | | | | |
| | | 186-193, | | | | | |
| | | 203-218, | | | | | |
| | | 228-234, | | | | | |
| | | 236-242, | | | | | |
| | | 257-264, | | | | | |
| | | 285-326, | | | | | |
| | | 332-342, | | | | | |
| | | 344-349, | | | | | |
| | | 353-370, | | | | | |
| | | 373-425, | | | | | |
| | | 428-437, | | | | | |
| | | 447-457, | | | | | |
| | | 472-483, | | | | | |
| | | 490-505, | | | | | |
| | | 516-526, | | | | | |
| | | 546-554, | | | | | |
| | | 556-570, | | | | | |
| | | 572-585, | | | | | |
| | | 601-609, | | | | | |
| | | 613-624, | | | | | |
| | | 626-640, | | | | | |
| | | 647-663, | | | | | |
| | | 665-671, | | | | | |
| | | 678-689, | | | | | |
| | | 691-697, | | | | | |
| | | 707-719, | | | | | |
| | | 721-751, | | | | | |
| | | 769-778 | | | | | |
| MCRH4322 | S. Adenylosuccinate | 4-10, 19-26, | 1-37, 41-119, | 6 | 93-182, | 160 | 374 |
| | synthetase | 28-34, 41-60, | 133-251, | | 360-391 | | |
| | (EC 6.3.4.4) | 62-81, | 255-277, | | | | |
| | (IMP-- | 89-97, 99-115, | 291-355, | | | | |
| | aspartate | 143-156, | 359-411 | | | | |
| | ligase (AdSS) | 162-181, | | | | | |
| | (AMPSase) - | 186-193, | | | | | |
| | Psychrobacter | 197-207, | | | | | |
| | cryohalolentis | 225-231, | | | | | |
| | (strain K5) | 233-240, | | | | | |
| | | 254-266, | | | | | |
| | | 283-296, | | | | | |
| | | 309-323, | | | | | |
| | | 325-338, | | | | | |
| | | 341-352, | | | | | |
| | | 363-373, | | | | | |
| | | 388-413, | | | | | |
| | | 420-426 | | | | | |
| MCRH4367 | L-aspartate | 5-37, 48-77, | 2-44, 85-108, | 9 | 34-88, 104-164, | 161 | 375 |
| | oxidase (EC | 82-89, 91-102, | 127-242, | | 168-227, | | |
| | 1.4.3.16) - | 119-127, | 245-259, | | 235-259, | | |
| | Limnobacters | 129-138, | 271-288, | | 279-301, | | |
| | MED105 | 145-179, | 291-329, | | 345-377 | | |
| | | 186-194, | 339-433, | | | | |
| | | 197-203, | 443-457, | | | | |
| | | 205-212, | 468-517 | | | | |
| | | 219-235, | | | | | |
| | | 243-250, | | | | | |
| | | 273-289, | | | | | |
| | | 294-304, | | | | | |
| | | 309-349, | | | | | |
| | | 352-363, | | | | | |
| | | 377-388, | | | | | |
| | | 391-399, | | | | | |
| | | 407-415, | | | | | |
| | | 418-443, | | | | | |
| | | 449-463, | | | | | |
| | | 471-477, | | | | | |
| | | 479-494, | | | | | |
| | | 496-503 | | | | | |
| MCRH4378 | Putative | 4-24, 32-39, | 15-131, | 7 | 9-96, 181-194 | 162 | 376 |
| | nicotinate- | 44-51, 60-70, | 139-285 | | | | |
| | nucleotide | 86-96, | | | | | |
| | pyrophosphorylase | 98-105, | | | | | |
| | (EC | 108-117, | | | | | |
| | 2.4.2.19) - | 122-138, | | | | | |
| | Neisseria | 142-156, | | | | | |
| | gonorrhoeae | 167-181, | | | | | |
| | (strain ATCC | 192-212, | | | | | |
| | 700825/FA | 214-223, | | | | | |
| | 1090) | 231-240, | | | | | |
| | | 254-278 | | | | | |
| MCRH4392 | Msp75 | 12-31, 41-47, | 9-27, 31-92, | 2 | 72-139 | 163 | 377 |
| | (Fragment) - | 50-73, | 94-134, | | | | |
| | Moraxella | 86-99, 103-109, | 147-199, | | | | |
| | catarrhalis | 141-147, | 202-268, | | | | |
| | | 152-167, | 271-291, | | | | |
| | | 180-195, | 303-333, | | | | |
| | | 201-214, | 336-465, | | | | |
| | | 216-237, | 480-498 | | | | |
| | | 240-246, | | | | | |
| | | 251-265, | | | | | |
| | | 275-281, | | | | | |
| | | 289-294, | | | | | |
| | | 301-314, | | | | | |
| | | 320-333, | | | | | |
| | | 342-349, | | | | | |
| | | 351-361, | | | | | |
| | | 367-389, | | | | | |
| | | 402-408, | | | | | |
| | | 426-435, | | | | | |
| | | 459-469 | | | | | |
| MCRH4469 | Molybdate | 23-34, 41-52, | 17-154, | 2 | 137-270 | 164 | 378 |
| | transport | 74-86, | 183-272 | | | | |
| | protein (ABC | 92-99, 107-121, | | | | | |
| | superfamily, | 123-130, | | | | | |
| | peri_bind) - | 154-159, | | | | | |
| | Acinetobacter | 162-169, | | | | | |
| | baumannii | 193-227, | | | | | |
| | | 229-243, | | | | | |
| | | 249-255, | | | | | |
| | | 260-269 | | | | | |
| MCRH4491 | Respiratory | 4-29, 81-88, | 1-52, 60-99, | 4 | 419-508 | 165 | 379 |
| | nitrate | 106-128, | 102-161, | | | | |
| | reductase beta | 177-200, | 166-189, | | | | |
| | subunit - | 207-214, | 203-294, | | | | |
| | Psychrobacters | 221-234, | 312-429, | | | | |
| | (strain | 240-250, | 436-468, | | | | |
| | PRwf-1) | 255-277, | 487-512 | | | | |
| | | 279-285, | | | | | |
| | | 291-324, | | | | | |
| | | 326-347, | | | | | |
| | | 349-362, | | | | | |
| | | 376-392, | | | | | |
| | | 400-412, | | | | | |
| | | 415-423, | | | | | |
| | | 425-440, | | | | | |
| | | 444-449, | | | | | |
| | | 453-460 | | | | | |
| MCRH4496 | Respiratory | 4-11, 42-49, | 2-25, 30-82, | 7 | 200-260, | 166 | 380 |
| | nitrate | 51-68, 91-97, | 95-287, | | 562-610, | | |
| | reductase | 111-122, | 304-370, | | 815-858, | | |
| | alpha subunit | 130-142, | 444-491, | | 892-903, | | |
| | apoprotein - | 156-178, | 507-662, | | 961-1060, | | |
| | Psychrobacter | 186-230, | 677-698, | | 1065-1073 | | |
| | arcticum | 247-252, | 704-746, | | | | |
| | | 278-297, | 763-811, | | | | |
| | | 303-331, | 818-920, | | | | |
| | | 337-344, | 926-970, | | | | |
| | | 355-360, | 989-1127, | | | | |
| | | 383-391, | 1130-1198, | | | | |
| | | 415-421, | 1203-1239 | | | | |
| | | 439-444, | | | | | |
| | | 452-463, | | | | | |
| | | 468-481, | | | | | |
| | | 516-524, | | | | | |
| | | 537-542, | | | | | |
| | | 558-570, | | | | | |
| | | 576-582, | | | | | |
| | | 590-597, | | | | | |
| | | 621-633, | | | | | |
| | | 655-661, | | | | | |
| | | 667-673, | | | | | |
| | | 680-688, | | | | | |
| | | 728-734, | | | | | |
| | | 764-771, | | | | | |
| | | 776-789, | | | | | |
| | | 803-810, | | | | | |
| | | 825-841, | | | | | |
| | | 844-853, | | | | | |
| | | 877-891, | | | | | |
| | | 893-907, | | | | | |
| | | 924-933, | | | | | |
| | | 947-960, | | | | | |
| | | 966-974, | | | | | |
| | | 984-989, | | | | | |
| | | 998-1011, | | | | | |
| | | 1018-1024, | | | | | |
| | | 1028-1034, | | | | | |
| | | 1044-1053, | | | | | |
| | | 1084-1093, | | | | | |
| | | 1104-1110, | | | | | |
| | | 1114-1121, | | | | | |
| | | 1146-1154, | | | | | |
| | | 1166-1173, | | | | | |
| | | 1189-1196, | | | | | |
| | | 1202-1210, | | | | | |
| | | 1212-1218, | | | | | |
| | | 1220-1228, | | | | | |
| | | 1243-1248 | | | | | |
| MCRH4526 | Hemoglobin | 25-41, 50-56 | 1-52, 55-157 | 15 | 75-155, | 167 | 381 |
| | utilization | 58-70, | 189-250 | | 197-242, | | |
| | protein | 101-111, | 269-311 | | 257-412, | | |
| | (Fragment) - | 118-126, | 358-576 | | 457-547, | | |
| | Moraxella | 138-147, | 582-774, | | 715-788, | | |
| | catarrhalis | 161-168, | 783-837, | | 874-936 | | |
| | | 242-252, | 855-924, | | | | |
| | | 271-291, | 930-961 | | | | |
| | | 320-329, | | | | | |
| | | 336-342, | | | | | |
| | | 353-364, | | | | | |
| | | 369-375, | | | | | |
| | | 383-389, | | | | | |
| | | 418-432, | | | | | |
| | | 473-484, | | | | | |
| | | 499-514, | | | | | |
| | | 520-532, | | | | | |
| | | 537-545, | | | | | |
| | | 548-560, | | | | | |
| | | 567-575, | | | | | |
| | | 588-606, | | | | | |
| | | 612-622, | | | | | |
| | | 628-634, | | | | | |
| | | 647-658, | | | | | |
| | | 666-673, | | | | | |
| | | 686-693, | | | | | |
| | | 700-706, | | | | | |
| | | 714-720, | | | | | |
| | | 734-744, | | | | | |
| | | 754-759, | | | | | |
| | | 786-798, | | | | | |
| | | 820-827, | | | | | |
| | | 852-859, | | | | | |
| | | 864-885, | | | | | |
| | | 892-899, | | | | | |
| | | 908-915, | | | | | |
| | | 921-933, | | | | | |
| | | 941-946, | | | | | |
| | | 950-957 | | | | | |
| MCRH4552 | S. UPF0082 | 29-36, 49-55 | 1-43, 55-73, | 9 | 20-87 | 168 | 382 |
| | protein | 92-100, | 108-155, | | | | |
| | Psyc_0938 - | 109-116, | 164-249 | | | | |
| | Psychrobacter | 127-135, | | | | | |
| | arcticum | 140-148, | | | | | |
| | | 153-158, | | | | | |
| | | 169-176, | | | | | |
| | | 179-191, | | | | | |
| | | 214-221, | | | | | |
| | | 227-237, | | | | | |
| | | 240-246 | | | | | |
| MCRH4568 | Protein | 5-19, 30-41, | 1-39, 57-119, | 4 | 15-83 | 169 | 383 |
| | tyrosine | 44-49, 64-70, | 131-166 | | | | |
| | phosphatase - | 72-80, | | | | | |
| | Reinekea | 82-88, 95-100, | | | | | |
| | sMED297 | 115-120, | | | | | |
| | | 141-163 | | | | | |
| MCRH4629 | NADH- | 18-53, 64-75, | 1-110, 114-160, | 9 | 155-173, | 170 | 384 |
| | quinone | 91-98, | 169-189, | | 239-280, | | |
| | oxidoreductase | 103-109, | 216-238, | | 501-575, | | |
| | (EC | 112-119, | 244-364, | | 689-727, | | |
| | 1.6.99.5) - | 154-167, | 378-409, | | 766-789, | | |
| | Psychrobacters | 173-181, | 422-446, | | 826-880 | | |
| | (strain | 200-208, | 453-475, | | | | |
| | PRwf-1) | 226-241, | 487-570, | | | | |
| | | 261-268, | 590-640, | | | | |
| | | 283-289, | 643-713, | | | | |
| | | 294-309, | 722-809, | | | | |
| | | 344-371, | 816-952, | | | | |
| | | 374-382, | 969-1017 | | | | |
| | | 388-398, | | | | | |
| | | 416-423, | | | | | |
| | | 425-439, | | | | | |
| | | 442-453, | | | | | |
| | | 456-472, | | | | | |
| | | 491-497, | | | | | |
| | | 502-513, | | | | | |
| | | 515-524, | | | | | |
| | | 527-542, | | | | | |
| | | 547-562, | | | | | |
| | | 599-608, | | | | | |
| | | 610-620, | | | | | |
| | | 623-632, | | | | | |
| | | 636-656, | | | | | |
| | | 666-675, | | | | | |
| | | 683-692, | | | | | |
| | | 697-703, | | | | | |
| | | 709-716, | | | | | |
| | | 747-769, | | | | | |
| | | 778-785, | | | | | |
| | | 792-805, | | | | | |
| | | 829-836, | | | | | |
| | | 863-870, | | | | | |
| | | 877-905, | | | | | |
| | | 913-922, | | | | | |
| | | 937-950, | | | | | |
| | | 952-985, | | | | | |
| | | 991-999 | | | | | |
| MCRH4641 | NADH- | 29-35, 40-64, | 43-130, | 13 | 19-144, | 171 | 385 |
| | quinone | 66-75, | 136-211, | | 219-359, | | |
| | oxidoreductase, | 115-122, | 242-297, | | 438-452 | | |
| | F subunit | 141-173, | 314-333, | | | | |
| | (EC 1.6.99.5) - | 179-187, | 338-387, | | | | |
| | Psychrobacters | 199-206, | 396-416, | | | | |
| | (strain | 209-215, | 422-459 | | | | |
| | PRwf-1) | 234-240, | | | | | |
| | | 244-251, | | | | | |
| | | 259-272, | | | | | |
| | | 297-303, | | | | | |
| | | 319-325, | | | | | |
| | | 332-348, | | | | | |
| | | 358-368, | | | | | |
| | | 372-382, | | | | | |
| | | 388-397, | | | | | |
| | | 399-405, | | | | | |
| | | 431-439, | | | | | |
| | | 446-454 | | | | | |
| MCRH4697 | Transferrin | 4-23, 30-35, | 1-28, 74-140, | 7 | 16-72, 526-619, | 172 | 386 |
| | binding | 77-84, 92-97, | 151-185, | | 625-694 | | |
| | protein B - | 105-113, | 194-218, | | | | |
| | Moraxella | 115-120, | 225-298, | | | | |
| | catarrhalis | 131-137, | 300-355, | | | | |
| | | 140-151, | 358-443, | | | | |
| | | 200-211, | 445-463, | | | | |
| | | 226-239, | 468-553, | | | | |
| | | 241-247, | 567-595, | | | | |
| | | 255-261, | 597-621, | | | | |
| | | 271-278, | 631-676, | | | | |
| | | 304-309, | 681-699 | | | | |
| | | 395-400, | | | | | |
| | | 429-435, | | | | | |
| | | 443-453, | | | | | |
| | | 478-493, | | | | | |
| | | 521-530, | | | | | |
| | | 535-553, | | | | | |
| | | 563-568, | | | | | |
| | | 571-581, | | | | | |
| | | 623-628, | | | | | |
| | | 660-667, | | | | | |
| | | 693-700 | | | | | |
| MCRH4706 | Putative | 4-18, 26-42, | 1-49, 59-247, | 7 | 244-462 | 173 | 387 |
| | uncharacterized | 58-79, 83-89, | 251-321, | | | | |
| | protein - | 99-108, | 338-404, | | | | |
| | Moraxella | 110-118, | 410-430, | | | | |
| | catarrhalis | 125-140, | 438-493 | | | | |
| | | 143-156, | | | | | |
| | | 168-175, | | | | | |
| | | 177-189, | | | | | |
| | | 211-227, | | | | | |
| | | 262-273, | | | | | |
| | | 281-291, | | | | | |
| | | 356-363, | | | | | |
| | | 383-402, | | | | | |
| | | 464-472 | | | | | |
| MCRH4712 | Hypothetical | 6-28, 57-65, | 1-43, 46-68, | 4 | 13-105 | 174 | 388 |
| | periplasmic | 72-81, 87-99 | 83-104 | | | | |
| | protein - | | | | | | |
| | Neisseria | | | | | | |
| | meningitidis | | | | | | |
| | serogroup C | | | | | | |
| | (strain | | | | | | |
| | 053442) | | | | | | |
| MCRH4716 | Transferrin | 4-12, 32-55, | 1-91, 102-123, | 14 | 219-278, | 175 | 389 |
| | binding | 67-81, 92-100, | 130-170, | | 280-417, | | |
| | protein A - | 119-126, | 173-290, | | 599-696, | | |
| | Moraxella | 143-151, | 307-327, | | 750-759 | | |
| | catarrhalis | 153-163, | 334-354, | | | | |
| | | 182-188, | 359-396, | | | | |
| | | 201-210, | 416-484, | | | | |
| | | 238-244, | 507-563, | | | | |
| | | 250-256, | 567-590, | | | | |
| | | 278-283, | 600-618, | | | | |
| | | 290-296, | 623-648, | | | | |
| | | 303-308, | 661-686, | | | | |
| | | 312-317, | 692-813, | | | | |
| | | 345-354, | 822-887, | | | | |
| | | 356-367, | 905-984, | | | | |
| | | 378-388, | 994-1076, | | | | |
| | | 423-434, | 1079-1093 | | | | |
| | | 442-449, | | | | | |
| | | 458-465, | | | | | |
| | | 476-488, | | | | | |
| | | 494-501, | | | | | |
| | | 510-520, | | | | | |
| | | 530-538, | | | | | |
| | | 551-563, | | | | | |
| | | 570-577, | | | | | |
| | | 582-601, | | | | | |
| | | 628-635, | | | | | |
| | | 700-714, | | | | | |
| | | 719-725, | | | | | |
| | | 744-752, | | | | | |
| | | 761-769, | | | | | |
| | | 778-786, | | | | | |
| | | 790-796, | | | | | |
| | | 821-839, | | | | | |
| | | 851-867, | | | | | |
| | | 872-878, | | | | | |
| | | 920-945, | | | | | |
| | | 957-975, | | | | | |
| | | 1022-1031, | | | | | |
| | | 1038-1047, | | | | | |
| | | 1084-1090 | | | | | |
| MCRH4730 | Methionine- | 6-39, 46-61, | 1-33, 35-63, | 3 | 151-220 | 176 | 390 |
| | R-sulfoxide | 67-72, 75-93, | 71-209, | | | | |
| | reductase (EC | 107-116, | 217-237, | | | | |
| | 1.8.4.11) - | 129-164, | 246-260, | | | | |
| | Psychrobacters | 169-176, | 283-313, | | | | |
| | (strain | 181-189, | 317-397, | | | | |
| | PRwf-1) | 226-243, | 399-431, | | | | |
| | | 245-255, | 445-476, | | | | |
| | | 267-274, | 479-558 | | | | |
| | | 277-305, | | | | | |
| | | 319-326, | | | | | |
| | | 342-363, | | | | | |
| | | 375-385, | | | | | |
| | | 390-404, | | | | | |
| | | 419-428, | | | | | |
| | | 439-446, | | | | | |
| | | 448-465, | | | | | |
| | | 478-488, | | | | | |
| | | 507-516, | | | | | |
| | | 524-530, | | | | | |
| | | 546-555 | | | | | |
| MCRH4740 | Lytic | 5-14, 25-50, | 9-175, 183-302 | 7 | 104-209, | 177 | 391 |
| | transglycosylase, | 84-91, 99-111, | | | 229-292 | | |
| | catalytic | 119-125, | | | | | |
| | precursor - | 129-144, | | | | | |
| | Psychrobacters | 188-197, | | | | | |
| | (strain | 200-208, | | | | | |
| | PRwf-1) | 228-234, | | | | | |
| | | 243-250, | | | | | |
| | | 262-269, | | | | | |
| | | 275-282, | | | | | |
| | | 294-299 | | | | | |
| MCRH4750 | RNA | 8-27, 29-42, | 1-71 | 1 | 8-61 | 178 | 392 |
| | polymerase | 45-62 | | | | | |
| | sigma factor - | | | | | | |
| | Psychrobacters | | | | | | |
| | (strain | | | | | | |
| | PRwf-1) | | | | | | |
| MCRH4908 | Probable | 13-39, 41-47, | 3-118, 120-171, | 8 | 261-330, | 179 | 393 |
| | penicillin- | 56-75, | 183-290, | | 337-365, | | |
| | binding | 78-87, 100-107, | 293-313, | | 587-709 | | |
| | protein | 121-127, | 316-343, | | | | |
| | transpeptidase | 146-157, | 345-367, | | | | |
| | domain - | 164-171, | 373-555, | | | | |
| | Psychrobacter | 173-183, | 561-651, | | | | |
| | arcticum | 201-207, | 655-730, | | | | |
| | | 210-216, | 737-773 | | | | |
| | | 221-231, | | | | | |
| | | 244-252, | | | | | |
| | | 255-263, | | | | | |
| | | 281-289, | | | | | |
| | | 291-309, | | | | | |
| | | 348-374, | | | | | |
| | | 390-401, | | | | | |
| | | 424-433, | | | | | |
| | | 435-445, | | | | | |
| | | 458-474, | | | | | |
| | | 509-530, | | | | | |
| | | 534-545, | | | | | |
| | | 548-565, | | | | | |
| | | 582-591, | | | | | |
| | | 597-602, | | | | | |
| | | 605-620, | | | | | |
| | | 622-628, | | | | | |
| | | 663-672, | | | | | |
| | | 686-691, | | | | | |
| | | 699-711, | | | | | |
| | | 728-742, | | | | | |
| | | 745-758, | | | | | |
| | | 773-786 | | | | | |
| MCRH4917 | Acid | 4-25, 41-54, | 1-30, 37-57, | 2 | 506-517, | 180 | 394 |
| | phosphatase | 92-98, 104-111, | 64-86, 93-191, | | 532-590 | | |
| | autotransporter - | 122-131, | 193-217, | | | | |
| | Moraxella | 144-151, | 231-277, | | | | |
| | catarrhalis | 154-160, | 296-361, | | | | |
| | | 200-207, | 365-394, | | | | |
| | | 215-233, | 398-529, | | | | |
| | | 243-253, | 534-735, | | | | |
| | | 259-270, | 742-785, | | | | |
| | | 278-297, | 788-912 | | | | |
| | | 299-310, | | | | | |
| | | 328-337, | | | | | |
| | | 345-352, | | | | | |
| | | 373-389, | | | | | |
| | | 398-405, | | | | | |
| | | 419-425, | | | | | |
| | | 438-447, | | | | | |
| | | 472-479, | | | | | |
| | | 483-489, | | | | | |
| | | 492-501, | | | | | |
| | | 505-519, | | | | | |
| | | 531-546, | | | | | |
| | | 550-555, | | | | | |
| | | 568-574, | | | | | |
| | | 581-589, | | | | | |
| | | 595-600, | | | | | |
| | | 622-631, | | | | | |
| | | 683-689, | | | | | |
| | | 714-725, | | | | | |
| | | 733-738, | | | | | |
| | | 747-759, | | | | | |
| | | 761-766, | | | | | |
| | | 772-779, | | | | | |
| | | 795-801, | | | | | |
| | | 814-821, | | | | | |
| | | 856-868, | | | | | |
| | | 899-907, | | | | | |
| | | 923-929, | | | | | |
| | | 931-937 | | | | | |
| MCRH4930 | Adhesin - | 4-10, 16-25, | 1-30, 32-88, | 488 | 60-298, | 181 | 395 |
| | Moraxella | 31-59, 66-75, | 143-330, | | 308-571, | | |
| | catarrhalis | 90-99, | 337-359, | | 616-842, | | |
| | | 102-107, | 379-434, | | 971-1120, | | |
| | | 136-149, | 480-583, | | 1126-1252, | | |
| | | 151-159, | 604-715, | | 1359-1652, | | |
| | | 185-202, | 719-736, | | 1688-1980, | | |
| | | 204-215, | 744-761, | | 2051-2106 | | |
| | | 224-237, | 768-800, | | | | |
| | | 240-248, | 805-850, | | | | |
| | | 254-262, | 874-889, | | | | |
| | | 272-278, | 898-948, | | | | |
| | | 310-316, | 961-1053, | | | | |
| | | 337-349, | 1058-1110, | | | | |
| | | 390-396, | 1135-1150, | | | | |
| | | 400-409, | 1157-1183, | | | | |
| | | 420-429, | 1189-1230, | | | | |
| | | 478-484, | 1235-1255, | | | | |
| | | 502-517, | 1259-1277, | | | | |
| | | 533-539, | 1308-1377, | | | | |
| | | 570-584, | 1383-1422, | | | | |
| | | 614-621, | 1428-1450, | | | | |
| | | 625-634, | 1453-1472, | | | | |
| | | 645-654, | 1474-1501, | | | | |
| | | 662-672, | 1507-1591, | | | | |
| | | 677-686, | 1596-1660, | | | | |
| | | 719-733, | 1669-1703, | | | | |
| | | 747-753, | 1709-1767, | | | | |
| | | 762-772, | 1788-1848, | | | | |
| | | 782-792, | 1861-1876, | | | | |
| | | 802-811, | 1922-1941, | | | | |
| | | 820-826, | 1944-1979, | | | | |
| | | 832-841, | 1998-2061, | | | | |
| | | 856-862, | 2069-2102, | | | | |
| | | 912-918, | 2115-2136 | | | | |
| | | 931-937, | | | | | |
| | | 964-970, | | | | | |
| | | 989-994, | | | | | |
| | | 1006-1011, | | | | | |
| | | 1017-1023, | | | | | |
| | | 1036-1043, | | | | | |
| | | 1053-1064, | | | | | |
| | | 1071-1077, | | | | | |
| | | 1082-1090, | | | | | |
| | | 1103-1109, | | | | | |
| | | 1128-1135, | | | | | |
| | | 1137-1143, | | | | | |
| | | 1156-1165, | | | | | |
| | | 1169-1174, | | | | | |
| | | 1197-1204, | | | | | |
| | | 1213-1222, | | | | | |
| | | 1255-1273, | | | | | |
| | | 1305-1311, | | | | | |
| | | 1315-1322, | | | | | |
| | | 1340-1346, | | | | | |
| | | 1352-1359, | | | | | |
| | | 1386-1393, | | | | | |
| | | 1403-1412, | | | | | |
| | | 1441-1447, | | | | | |
| | | 1459-1468, | | | | | |
| | | 1470-1479, | | | | | |
| | | 1493-1500, | | | | | |
| | | 1511-1520, | | | | | |
| | | 1525-1537, | | | | | |
| | | 1544-1557, | | | | | |
| | | 1564-1569, | | | | | |
| | | 1580-1585, | | | | | |
| | | 1591-1596, | | | | | |
| | | 1627-1633, | | | | | |
| | | 1642-1656, | | | | | |
| | | 1690-1697, | | | | | |
| | | 1707-1713, | | | | | |
| | | 1715-1721, | | | | | |
| | | 1751-1761, | | | | | |
| | | 1773-1781, | | | | | |
| | | 1791-1796, | | | | | |
| | | 1804-1810, | | | | | |
| | | 1846-1851, | | | | | |
| | | 1860-1870, | | | | | |
| | | 1876-1882, | | | | | |
| | | 1910-1917, | | | | | |
| | | 1947-1953, | | | | | |
| | | 1962-1970, | | | | | |
| | | 2008-2019, | | | | | |
| | | 2026-2036, | | | | | |
| | | 2043-2051, | | | | | |
| | | 2085-2090, | | | | | |
| | | 2105-2115, | | | | | |
| | | 2132-2142 | | | | | |
| MCRH4983 | Heat shock | 17-25, 29-38, | 1-98, 108-194, | 10 | 16-287 | 182 | 396 |
| | protein 70 - | 41-60, | 205-473, | | | | |
| | Psychrobacter | 97-105, | 490-510, | | | | |
| | cryohalolentis | 111-117, | 517-557, | | | | |
| | (strain K5) | 124-159, | 559-615 | | | | |
| | | 172-181, | | | | | |
| | | 186-192, | | | | | |
| | | 200-207, | | | | | |
| | | 212-229, | | | | | |
| | | 241-257, | | | | | |
| | | 267-298, | | | | | |
| | | 305-314, | | | | | |
| | | 316-322, | | | | | |
| | | 335-341, | | | | | |
| | | 345-355, | | | | | |
| | | 357-364, | | | | | |
| | | 367-375, | | | | | |
| | | 377-382, | | | | | |
| | | 387-400, | | | | | |
| | | 407-413, | | | | | |
| | | 417-428, | | | | | |
| | | 437-443, | | | | | |
| | | 448-454, | | | | | |
| | | 456-463, | | | | | |
| | | 469-477, | | | | | |
| | | 483-489, | | | | | |
| | | 495-508, | | | | | |
| | | 513-524, | | | | | |
| | | 540-551, | | | | | |
| | | 585-602 | | | | | |
| MCRH5027 | Alanyl-tRNA | 10-33, 35-41, | 1-31, 33-74, | 16 | 34-89, 124-209, | 183 | 397 |
| | synthetase | 50-55, | 85-118, | | 227-245, | | |
| | (EC 6.1.1.7) - | 60-73, 81-90, | 138-158, | | 271-338, | | |
| | Psychrobacters | 106-114, | 165-184, | | 402-453, | | |
| | (strain | 121-136, | 204-359, | | 496-596 | | |
| | PRwf-1) | 147-158, | 375-402, | | | | |
| | | 179-191, | 408-478, | | | | |
| | | 212-219, | 491-511, | | | | |
| | | 229-236, | 531-640, | | | | |
| | | 266-275, | 653-745, | | | | |
| | | 285-307, | 756-861, | | | | |
| | | 312-318, | 871-889 | | | | |
| | | 334-345, | | | | | |
| | | 351-359, | | | | | |
| | | 361-336, | | | | | |
| | | 373-390, | | | | | |
| | | 398-419, | | | | | |
| | | 450-464, | | | | | |
| | | 475-483, | | | | | |
| | | 495-506, | | | | | |
| | | 524-530, | | | | | |
| | | 534-546, | | | | | |
| | | 555-565, | | | | | |
| | | 572-583, | | | | | |
| | | 596-603, | | | | | |
| | | 623-640, | | | | | |
| | | 658-664, | | | | | |
| | | 675-685, | | | | | |
| | | 690-696, | | | | | |
| | | 702-711, | | | | | |
| | | 714-723, | | | | | |
| | | 742-748, | | | | | |
| | | 765-772, | | | | | |
| | | 783-790, | | | | | |
| | | 811-823, | | | | | |
| | | 835-842, | | | | | |
| | | 848-854, | | | | | |
| | | 874-881 | | | | | |
| MCRH5073 | Flavin | 19-31, 39-48, | 1-32, 34-74, | 7 | 119-185, | 184 | 398 |
| | reductase (EC | 50-61, | 93-115, | | 241-349 | | |
| | 1.5.1.30) - | 70-76, 85-96, | 134-190, | | | | |
| | Mannheimia | 98-106, | 192-255, | | | | |
| | haemolytica | 114-127, | 266-339 | | | | |
| | PHL213 | 129-159, | | | | | |
| | | 166-184, | | | | | |
| | | 195-210, | | | | | |
| | | 215-224, | | | | | |
| | | 234-240, | | | | | |
| | | 247-254, | | | | | |
| | | 259-265, | | | | | |
| | | 267-284, | | | | | |
| | | 286-295, | | | | | |
| | | 297-307, | | | | | |
| | | 310-318, | | | | | |
| | | 320-330, | | | | | |
| | | 340-347 | | | | | |
| MCRH5107 | Putative | 16-31, 45-52, | 1-62, 85-154, | 5 | 188-255, | 185 | 399 |
| | uncharacterized | 62-68, | 172-222, | | 319-334 | | |
| | protein | 89-149, | 224-248, | | | | |
| | precursor - | 154-164, | 252-328 | | | | |
| | Psychrobacters | 175-185, | | | | | |
| | (strain | 187-193, | | | | | |
| | PRwf-1) | 195-207, | | | | | |
| | | 222-230, | | | | | |
| | | 253-279, | | | | | |
| | | 287-295, | | | | | |
| | | 299-323 | | | | | |
| MCRH5149 | Surface | 7-15, 38-65, | 1-105, 115-293, | 1 | 23-98 | 186 | 400 |
| | antigen (D15) | 67-76, 80-103, | 300-342, | | | | |
| | precursor - | 123-139, | 344-418, | | | | |
| | Psychrobacters | 146-152, | 432-562, | | | | |
| | (strain | 181-188, | 567-598, | | | | |
| | PRwf-1) | 196-206, | 613-656, | | | | |
| | | 223-229, | 670-713, | | | | |
| | | 234-245, | 757-803 | | | | |
| | | 259-267, | | | | | |
| | | 285-296, | | | | | |
| | | 323-333, | | | | | |
| | | 340-358, | | | | | |
| | | 387-393, | | | | | |
| | | 401-409, | | | | | |
| | | 417-427, | | | | | |
| | | 431-439, | | | | | |
| | | 441-450, | | | | | |
| | | 472-477, | | | | | |
| | | 483-496, | | | | | |
| | | 508-524, | | | | | |
| | | 591-598, | | | | | |
| | | 602-610, | | | | | |
| | | 616-624, | | | | | |
| | | 627-641, | | | | | |
| | | 655-664, | | | | | |
| | | 666-679, | | | | | |
| | | 687-694, | | | | | |
| | | 696-709, | | | | | |
| | | 714-726, | | | | | |
| | | 759-766, | | | | | |
| | | 768-778, | | | | | |
| | | 782-793, | | | | | |
| | | 804-810 | | | | | |
| MCRH5176 | S. Uridylate | 9-18, 35-57, | 2-174, 176-241 | 2 | 26-112 | 187 | 401 |
| | kinase (EC | 65-74, 82-87, | | | | | |
| | 2.7.4.22) | 92-98, | | | | | |
| | (UK) | 105-117, | | | | | |
| | (Uridine | 128-136, | | | | | |
| | monophosphate | 147-154, | | | | | |
| | kinase | 157-165, | | | | | |
| | (UMP kinase) | 181-187, | | | | | |
| | (UMPK) - | 189-218, | | | | | |
| | Psychrobacter | 224-232 | | | | | |
| | cryohalolentis | | | | | | |
| | (strain K5) | | | | | | |
| MCRH5178 | Transketolase | 4-13, 24-35, | 1-40, 46-117, | 4 | 13-84, 395-470 | 188 | 402 |
| | (EC 2.2.1.1) - | 49-56, 71-77, | 127-171, | | | | |
| | Acinetobacter | 81-98, | 186-201, | | | | |
| | baumannii | 103-109, | 203-318, | | | | |
| | | 134-150, | 332-352, | | | | |
| | | 158-169, | 356-390, | | | | |
| | | 176-186, | 411-543, | | | | |
| | | 188-195, | 560-669 | | | | |
| | | 222-229, | | | | | |
| | | 249-262, | | | | | |
| | | 273-282, | | | | | |
| | | 335-341, | | | | | |
| | | 358-366, | | | | | |
| | | 375-395, | | | | | |
| | | 415-423, | | | | | |
| | | 431-448, | | | | | |
| | | 468-477, | | | | | |
| | | 486-492, | | | | | |
| | | 500-517, | | | | | |
| | | 526-539, | | | | | |
| | | 553-558, | | | | | |
| | | 563-571, | | | | | |
| | | 573-579, | | | | | |
| | | 581-603, | | | | | |
| | | 606-641, | | | | | |
| | | 649-657, | | | | | |
| | | 659-669 | | | | | |
| MCRH5224 | Valyl-tRNA | 43-56, 95-108, | 1-91, 93-195, | 12 | 30-60, 107-144, | 189 | 403 |
| | synthetase - | 139-145, | 199-284, | | 235-255, | | |
| | Psychrobacter | 158-178, | 324-357, | | 439-492, | | |
| | cryohalolentis | 186-199, | 385-405, | | 620-673, | | |
| | (strain K5) | 204-216, | 409-499, | | 767-814, | | |
| | | 224-231, | 506-604, | | 864-969 | | |
| | | 234-247, | 621-678, | | | | |
| | | 251-275, | 688-749, | | | | |
| | | 282-290, | 753-806, | | | | |
| | | 303-309, | 815-882, | | | | |
| | | 312-329, | 887-927, | | | | |
| | | 331-341, | 933-953 | | | | |
| | | 349-355, | | | | | |
| | | 379-405, | | | | | |
| | | 410-416, | | | | | |
| | | 429-436, | | | | | |
| | | 452-457, | | | | | |
| | | 463-474, | | | | | |
| | | 476-483, | | | | | |
| | | 485-491, | | | | | |
| | | 507-531, | | | | | |
| | | 546-563, | | | | | |
| | | 573-585, | | | | | |
| | | 628-635, | | | | | |
| | | 663-669, | | | | | |
| | | 687-700, | | | | | |
| | | 718-725, | | | | | |
| | | 731-742, | | | | | |
| | | 758-769, | | | | | |
| | | 788-795, | | | | | |
| | | 800-811, | | | | | |
| | | 824-831, | | | | | |
| | | 841-852, | | | | | |
| | | 859-865, | | | | | |
| | | 869-881, | | | | | |
| | | 885-891, | | | | | |
| | | 896-904, | | | | | |
| | | 941-951, | | | | | |
| | | 955-972 | | | | | |
| MCRH5239 | Putative | 6-31, 59-73, | 6-51, 54-151, | 2 | 319-382 | 190 | 404 |
| | uncharacterized | 76-87, 98-104, | 161-194, | | | | |
| | protein | 107-118, | 203-357, | | | | |
| | precursor - | 126-145, | 361-474, | | | | |
| | Psychrobacters | 156-165, | 477-497, | | | | |
| | (strain | 168-177, | 501-538, | | | | |
| | PRwf-1) | 185-193, | 541-615 | | | | |
| | | 206-214, | | | | | |
| | | 217-237, | | | | | |
| | | 245-252, | | | | | |
| | | 256-276, | | | | | |
| | | 288-304, | | | | | |
| | | 314-331, | | | | | |
| | | 333-340, | | | | | |
| | | 366-378, | | | | | |
| | | 387-406, | | | | | |
| | | 409-423, | | | | | |
| | | 428-437, | | | | | |
| | | 457-463, | | | | | |
| | | 480-488, | | | | | |
| | | 509-519, | | | | | |
| | | 536-542, | | | | | |
| | | 550-563, | | | | | |
| | | 571-593, | | | | | |
| | | 606-612 | | | | | |
| MCRH5260 | Putative | 6-12, 17-31, | 1-53 | 8 | 2-60 | 191 | 405 |
| | amino-acid | 33-48 | | | | | |
| | transport | | | | | | |
| | protein - | | | | | | |
| | Neisseria | | | | | | |
| | gonorrhoeae | | | | | | |
| | (strain ATCC | | | | | | |
| | 700825/FA | | | | | | |
| | 1090) | | | | | | |
| MCRH5275 | Isoleucyl- | 54-61, 64-86, | 2-97, 111-196, | 5 | 29-54, 261-267, | 192 | 406 |
| | tRNA | 91-109, | 209-321, | | 635-691 | | |
| | synthetase | 111-120, | 327-349, | | | | |
| | (EC 6.1.1.5) - | 127-133, | 353-367, | | | | |
| | Psychrobacters | 135-143, | 377-408, | | | | |
| | (strain | 147-152, | 418-491, | | | | |
| | PRwf-1) | 166-176, | 500-664, | | | | |
| | | 179-186, | 691-772, | | | | |
| | | 189-207, | 788-1019, | | | | |
| | | 212-220, | 1024-1049, | | | | |
| | | 226-231, | 1054-1077, | | | | |
| | | 235-242, | 1079-1095 | | | | |
| | | 250-267, | | | | | |
| | | 271-279, | | | | | |
| | | 294-308, | | | | | |
| | | 316-336, | | | | | |
| | | 347-353, | | | | | |
| | | 362-368, | | | | | |
| | | 380-389, | | | | | |
| | | 391-398, | | | | | |
| | | 406-418, | | | | | |
| | | 441-463, | | | | | |
| | | 471-500, | | | | | |
| | | 503-522, | | | | | |
| | | 524-560, | | | | | |
| | | 562-570, | | | | | |
| | | 572-582, | | | | | |
| | | 584-590, | | | | | |
| | | 634-639, | | | | | |
| | | 643-652, | | | | | |
| | | 657-663, | | | | | |
| | | 666-673, | | | | | |
| | | 697-707, | | | | | |
| | | 714-721, | | | | | |
| | | 727-734, | | | | | |
| | | 743-751, | | | | | |
| | | 758-776, | | | | | |
| | | 796-806, | | | | | |
| | | 852-867, | | | | | |
| | | 870-896, | | | | | |
| | | 898-905, | | | | | |
| | | 923-945, | | | | | |
| | | 948-955, | | | | | |
| | | 957-962, | | | | | |
| | | 964-969, | | | | | |
| | | 982-988, | | | | | |
| | | 1000-1006, | | | | | |
| | | 1008-1014, | | | | | |
| | | 1030-1042, | | | | | |
| | | 1056-1068, | | | | | |
| | | 1075-1086 | | | | | |
| MCRH5294 | Major outer | 4-16, 18-41, | 1-139, 145-180, | 34 | 118-193, | 193 | 407 |
| | membrane | 47-54, 106-113, | 186-261, | | 209-355, | | |
| | protein - | 120-131, | 271-291, | | 505-657 | | |
| | Moraxella | 144-150, | 308-328, | | | | |
| | catarrhalis | 165-171, | 332-365, | | | | |
| | | 192-202, | 372-394, | | | | |
| | | 220-227, | 400-440, | | | | |
| | | 229-239, | 453-530, | | | | |
| | | 245-259, | 533-585, | | | | |
| | | 314-327, | 588-631, | | | | |
| | | 358-365, | 639-687, | | | | |
| | | 377-384, | 695-746 | | | | |
| | | 396-402, | | | | | |
| | | 414-430, | | | | | |
| | | 436-442, | | | | | |
| | | 457-466, | | | | | |
| | | 474-480, | | | | | |
| | | 498-519, | | | | | |
| | | 524-531, | | | | | |
| | | 535-541, | | | | | |
| | | 564-569, | | | | | |
| | | 581-597, | | | | | |
| | | 622-628, | | | | | |
| | | 653-676, | | | | | |
| | | 681-686, | | | | | |
| | | 719-727 | | | | | |
| MCRH5308 | Putative | 6-27, 50-56, | 1-44, 46-115, | 2 | 161-212, | 194 | 408 |
| | thiol:disulfide | 62-72, 80-86, | 132-192, | | 218-247 | | |
| | interchange | 98-111, | 222-242, | | | | |
| | protein | 118-127, | 246-264 | | | | |
| | precursor - | 138-168, | | | | | |
| | Psychrobacter | 176-184, | | | | | |
| | cryohalolentis | 189-201, | | | | | |
| | (strain K5) | 205-245, | | | | | |
| | | 256-263 | | | | | |
| MCRH5342 | RND efflux | 6-28, 32-41, | 1-49, 51-166, | 6 | 5-82, 101-118, | 195 | 409 |
| | system, outer | 46-66, 74-84, | 170-203, | | 260-376 | | |
| | membrane | 92-108, | 208-368, | | | | |
| | lipoprotein, | 110-117, | 382-486, | | | | |
| | NodT - | 137-146, | 489-507 | | | | |
| | Psychrobacter | 152-170, | | | | | |
| | cryohalolentis | 173-200, | | | | | |
| | (strain K5) | 226-264, | | | | | |
| | | 266-275, | | | | | |
| | | 284-301, | | | | | |
| | | 308-313, | | | | | |
| | | 316-335, | | | | | |
| | | 355-364, | | | | | |
| | | 374-388, | | | | | |
| | | 394-404, | | | | | |
| | | 406-416, | | | | | |
| | | 424-431, | | | | | |
| | | 437-452, | | | | | |
| | | 456-477 | | | | | |
| MCRH5355 | Secretion | 4-13, 16-26, | 1-67, 73-274, | 8 | 119-189, | 196 | 410 |
| | protein HlyD | 28-34, 39-45, | 288-429, | | 200-246, | | |
| | precursor - | 47-63, | 434-465 | | 399-436 | | |
| | Psychrobacter | 68-121, | | | | | |
| | cryohalolentis | 130-145, | | | | | |
| | (strain K5) | 150-162, | | | | | |
| | | 165-171, | | | | | |
| | | 176-203, | | | | | |
| | | 215-240, | | | | | |
| | | 242-249, | | | | | |
| | | 251-261, | | | | | |
| | | 282-290, | | | | | |
| | | 293-309, | | | | | |
| | | 316-322, | | | | | |
| | | 334-352, | | | | | |
| | | 360-367, | | | | | |
| | | 397-410, | | | | | |
| | | 412-422, | | | | | |
| | | 430-439 | | | | | |
| MCRH5441 | Putative | 4-12, 15-22, | 1-42, 57-82, | 3 | 30-110 | 197 | 411 |
| | uncharacterized | 25-34, 36-47, | 87-123, | | | | |
| | protein - | 54-79, | 127-498 | | | | |
| | Psychrobacter | 92-99, 106-114, | | | | | |
| | arcticum | 129-136, | | | | | |
| | | 150-160, | | | | | |
| | | 168-184, | | | | | |
| | | 186-215, | | | | | |
| | | 222-229, | | | | | |
| | | 239-249, | | | | | |
| | | 286-293, | | | | | |
| | | 299-314, | | | | | |
| | | 322-327, | | | | | |
| | | 333-358, | | | | | |
| | | 371-378, | | | | | |
| | | 387-406, | | | | | |
| | | 413-422, | | | | | |
| | | 435-443, | | | | | |
| | | 448-455, | | | | | |
| | | 461-471, | | | | | |
| | | 474-480, | | | | | |
| | | 489-495 | | | | | |
| MCRH5451 | Alcohol | 4-29, 42-68, | 1-52, 57-80 | 4 | 15-86 | 198 | 412 |
| | dehydrogenase | 70-79 | | | | | |
| | class III/S- | | | | | | |
| | (Hydroxymethyl)glutathion | | | | | | |
| | dehydrogenase - | | | | | | |
| | Actinobacillus | | | | | | |
| | succinogenes | | | | | | |
| | (strain ATCC | | | | | | |
| | 55618/ | | | | | | |
| | 130Z) | | | | | | |
| MCRH5471 | Probable | 8-51, 78-86, | 1-129, 131-247, | 5 | 187-241, | 199 | 413 |
| | penicillin- | 94-99, 107-113, | 263-335, | | 319-394, | | |
| | binding | 140-148, | 343-364, | | 411-485, | | |
| | protein 1A - | 156-162, | 370-639, | | 657-679 | | |
| | Psychrobacter | 173-181, | 652-697, | | | | |
| | arcticum | 189-197, | 712-779 | | | | |
| | | 213-229, | | | | | |
| | | 264-270, | | | | | |
| | | 274-281, | | | | | |
| | | 283-293, | | | | | |
| | | 308-321, | | | | | |
| | | 347-360, | | | | | |
| | | 399-411, | | | | | |
| | | 425-436, | | | | | |
| | | 442-449, | | | | | |
| | | 466-482, | | | | | |
| | | 486-498, | | | | | |
| | | 516-521, | | | | | |
| | | 527-534, | | | | | |
| | | 557-565, | | | | | |
| | | 586-594, | | | | | |
| | | 604-617, | | | | | |
| | | 622-630, | | | | | |
| | | 652-674, | | | | | |
| | | 720-731, | | | | | |
| | | 742-754, | | | | | |
| | | 773-783 | | | | | |
| MCRH5547 | Phosphoribosylaminoimidazole | 7-14, 36-46, | 16-67, 69-91, | 2 | 48-105 | 200 | 414 |
| | carboxylase, | 48-57, 74-81, | 96-134, | | | | |
| | catalytic | 85-108, | 137-177 | | | | |
| | subuni (EC | 113-131, | | | | | |
| | 4.1.1.21) - | 141-154, | | | | | |
| | Psychrobacters | 168-179 | | | | | |
| | (strain | | | | | | |
| | PRwf-1) | | | | | | |
| MCRH5559 | Putative | 4-20, 28-33, | 1-85, 92-148 | 9 | 15-142 | 201 | 415 |
| | uncharacterized | 39-55, 57-65, | | | | | |
| | protein - | 68-82, | | | | | |
| | Moraxella | 84-92, 117-123 | | | | | |
| | nonliquefaciens | | | | | | |
| MCRH5574 | Dihydroorotase | 4-9, 17-23, | 1-18, 37-57, | 5 | 7-100, 152-243 | 202 | 416 |
| | (EC | 37-53, 71-89, | 68-278, | | | | |
| | 3.5.2.3) - | 104-116, | 306-400 | | | | |
| | Psychrobacters | 123-128, | | | | | |
| | (strain | 133-138, | | | | | |
| | PRwf-1) | 145-170, | | | | | |
| | | 173-205, | | | | | |
| | | 213-232, | | | | | |
| | | 234-252, | | | | | |
| | | 260-268, | | | | | |
| | | 275-280, | | | | | |
| | | 287-311, | | | | | |
| | | 316-345, | | | | | |
| | | 357-364 | | | | | |
| MCRH5581 | Sel1 domain | 5-19, 38-45, | 1-27, 44-147, | 2 | 22-73, 224-290 | 203 | 417 |
| | protein | 77-83, 89-99, | 159-255, | | | | |
| | repeat- | 108-119, | 262-280, | | | | |
| | containing | 125-132, | 288-302 | | | | |
| | protein - | 144-153, | | | | | |
| | Candidatus | 161-171, | | | | | |
| | Amoebophilus | 180-191, | | | | | |
| | asiaticus | 221-227, | | | | | |
| | 5a2 | 233-243, | | | | | |
| | | 274-286, | | | | | |
| | | 293-299 | | | | | |
| MCRH5639 | Aconitate | 8-15, 17-39, | 2-17, 28-146, | 43 | 157-185, | 204 | 418 |
| | hydratase 2 | 48-55, 57-77, | 152-170, | | 341-483 | | |
| | (EC 4.2.1.3) - | 87-95, | 198-214, | | | | |
| | Acinetobacter | 99-109, | 235-270, | | | | |
| | baumannii | 119-132, | 279-326, | | | | |
| | | 146-152, | 333-368, | | | | |
| | | 171-176, | 381-407, | | | | |
| | | 196-203, | 435-608, | | | | |
| | | 220-229, | 624-650, | | | | |
| | | 231-245, | 656-673, | | | | |
| | | 253-259, | 711-779, | | | | |
| | | 273-285, | 782-799, | | | | |
| | | 293-300, | 809-872 | | | | |
| | | 318-324, | | | | | |
| | | 331-344, | | | | | |
| | | 367-374, | | | | | |
| | | 395-401, | | | | | |
| | | 409-414, | | | | | |
| | | 434-471, | | | | | |
| | | 483-490, | | | | | |
| | | 509-517, | | | | | |
| | | 519-534, | | | | | |
| | | 537-544, | | | | | |
| | | 554-574, | | | | | |
| | | 584-590, | | | | | |
| | | 599-609, | | | | | |
| | | 615-625, | | | | | |
| | | 632-639, | | | | | |
| | | 665-672, | | | | | |
| | | 676-686, | | | | | |
| | | 688-697, | | | | | |
| | | 702-708, | | | | | |
| | | 714-720, | | | | | |
| | | 730-742, | | | | | |
| | | 744-752, | | | | | |
| | | 780-786, | | | | | |
| | | 790-800, | | | | | |
| | | 812-836 | | | | | |
| MCRH5640 | Aconitate | 4-57, 60-67, | 5-114 | 5 | 38-112 | 205 | 419 |
| | hydratase 2 | 80-96, 98-118 | | | | | |
| | (EC 4.2.1.3) - | | | | | | |
| | Acinetobacter | | | | | | |
| | baumannii | | | | | | |
| MCRH5644 | Aconitate | 11-34, 43-51, | 9-30, 40-168 | 12 | 13-78 | 206 | 420 |
| | hydratase 2 | 67-108, | | | | | |
| | (EC 4.2.1.3) - | 116-138, | | | | | |
| | Acinetobacter | 151-165 | | | | | |
| | baumannii | | | | | | |
| MCRH5729 | S. UvrABC | 18-24, 40-47, | 7-67, 71-131, | 3 | 504-552 | 207 | 421 |
| | system | 51-62, | 134-231, | | | | |
| | protein C | 67-74, 87-94, | 233-260, | | | | |
| | (Protein | 102-109, | 276-340, | | | | |
| | uvrC) | 112-121, | 342-385, | | | | |
| | (Excinuclease | 141-147, | 388-443, | | | | |
| | ABC subunit | 152-164, | 447-475, | | | | |
| | C) - | 175-198, | 509-616 | | | | |
| | Psychrobacter | 200-224, | | | | | |
| | cryohalolentis | 229-235, | | | | | |
| | (strain K5) | 245-260, | | | | | |
| | | 262-293, | | | | | |
| | | 310-323, | | | | | |
| | | 326-349, | | | | | |
| | | 390-414, | | | | | |
| | | 423-431, | | | | | |
| | | 440-447, | | | | | |
| | | 456-462, | | | | | |
| | | 466-476, | | | | | |
| | | 481-493, | | | | | |
| | | 497-504, | | | | | |
| | | 512-538, | | | | | |
| | | 545-550, | | | | | |
| | | 560-573, | | | | | |
| | | 584-591, | | | | | |
| | | 596-602, | | | | | |
| | | 607-613 | | | | | |
| MCRH5753 | Aminobutyrate | 11-17, 38-49, | 7-106 | 4 | 16-107 | 208 | 422 |
| | aminotransferase - | 52-58, | | | | | |
| | Moraxella | 67-79, 98-104 | | | | | |
| | catarrhalis | | | | | | |
| MCRH5785 | Putative | 5-17, 32-46, | 3-38, 55-69, | 4 | 22-96, 124-131, | 209 | 423 |
| | uncharacterized | 54-60, 89-102, | 72-135, | | 143-172, | | |
| | protein - | 112-127, | 165-301 | | 209-275 | | |
| | Neisseria | 152-161, | | | | | |
| | gonorrhoeae | 169-178, | | | | | |
| | (strain ATCC | 186-193, | | | | | |
| | 700825/FA | 228-240, | | | | | |
| | 1090) | 247-256, | | | | | |
| | | 259-266, | | | | | |
| | | 274-296 | | | | | |
| MCRH5787 | Replication | 17-26, 32-44 | 1-43 | 7 | 28-49 | 210 | 424 |
| | restart DNA | | | | | | |
| | helicase PriA - | | | | | | |
| | Psychrobacter | | | | | | |
| | arcticum | | | | | | |
| MCRH5838 | Ubiquitous | 11-17, 26-32, | 73-125, | 83 | 6-428, 493-608 | 211 | 425 |
| | surface | 72-77, | 133-152, | | | | |
| | protein A2H - | 162-168, | 163-246, | | | | |
| | Moraxella | 204-211, | 264-330, | | | | |
| | catarrhalis | 218-224, | 337-376, | | | | |
| | | 234-243, | 594-635, | | | | |
| | | 270-276, | 660-680, | | | | |
| | | 287-301, | 693-711, | | | | |
| | | 314-333, | 715-816 | | | | |
| | | 339-345, | | | | | |
| | | 360-375, | | | | | |
| | | 392-398, | | | | | |
| | | 403-409, | | | | | |
| | | 419-434, | | | | | |
| | | 438-444, | | | | | |
| | | 454-468, | | | | | |
| | | 473-479, | | | | | |
| | | 489-503, | | | | | |
| | | 508-514, | | | | | |
| | | 524-539, | | | | | |
| | | 543-549, | | | | | |
| | | 559-574, | | | | | |
| | | 578-584, | | | | | |
| | | 607-616, | | | | | |
| | | 618-628, | | | | | |
| | | 664-669, | | | | | |
| | | 710-715, | | | | | |
| | | 718-730, | | | | | |
| | | 734-740, | | | | | |
| | | 747-763, | | | | | |
| | | 766-772, | | | | | |
| | | 774-785, | | | | | |
| | | 787-796 | | | | | |
| MCRH5853 | Putative | 14-29, 32-58, | 1-58, 67-95, | 6 | 127-190, | 212 | 426 |
| | isocitrate | 63-76, | 123-168, | | 537-604, | | |
| | dehydrogenase | 78-86, 89-100, | 176-240, | | 697-727 | | |
| | (EC | 102-110, | 242-284, | | | | |
| | 1.1.1.42) - | 131-140, | 287-317, | | | | |
| | Neisseria | 148-154, | 325-390, | | | | |
| | meningitidis | 188-201, | 398-418, | | | | |
| | serogroup C/ | 210-219, | 423-499, | | | | |
| | serotype 2a | 230-243, | 510-582, | | | | |
| | (strain ATCC | 245-254, | 598-631, | | | | |
| | 700532- | 262-281, | 635-683, | | | | |
| | FAM18) | 298-307, | 692-734 | | | | |
| | | 316-324, | | | | | |
| | | 340-352, | | | | | |
| | | 373-396, | | | | | |
| | | 407-414, | | | | | |
| | | 440-453, | | | | | |
| | | 456-477, | | | | | |
| | | 480-487, | | | | | |
| | | 495-508, | | | | | |
| | | 515-529, | | | | | |
| | | 537-544, | | | | | |
| | | 552-560, | | | | | |
| | | 564-572, | | | | | |
| | | 587-592, | | | | | |
| | | 605-619, | | | | | |
| | | 625-632, | | | | | |
| | | 638-644, | | | | | |
| | | 660-674, | | | | | |
| | | 684-690, | | | | | |
| | | 697-719, | | | | | |
| | | 732-738 | | | | | |
| MCRH5872 | Alpha/beta | 13-27, 38-44, | 1-106, 125-251, | 6 | 42-51, 97-267 | 213 | 427 |
| | hydrolase | 48-55, | 257-306, | | | | |
| | fold - | 57-69, 72-81, | 310-356 | | | | |
| | Psychrobacter | 97-108, | | | | | |
| | cryohalolentis | 126-141, | | | | | |
| | (strain K5) | 152-160, | | | | | |
| | | 165-177, | | | | | |
| | | 180-186, | | | | | |
| | | 197-241, | | | | | |
| | | 289-296, | | | | | |
| | | 309-328, | | | | | |
| | | 334-339, | | | | | |
| | | 341-353 | | | | | |
| MCRH5882 | Probable | 4-10, 12-21, | 1-124 | 1 | 9-86 | 214 | 428 |
| | HesA/MoeB/ | 29-35, 44-56, | | | | | |
| | ThiF family | 59-67, | | | | | |
| | protein - | 74-86, 91-98, | | | | | |
| | Psychrobacter | 103-114 | | | | | |
| | arcticum | | | | | | |

The 214 antigenic ORFs were identified by screening bacterial libraries displaying the fragmented genome of Mcat RH4 with human immunoglobulin.
^{a}From the whole genome sequence of Mcat RH4, determined by Intercell AG (Vienna, Austria).
^{b}Prediction of sequences longer than 5 amino acids capable of inducing an antibody response was performed with the program ANTIGENIC (Kolaskar, A. S. and Tongaonkar, P. C., 1990).
^{c}Prediction of sequences capable of inducing a human class II-restricted T cell response was performed with the program “MHC-II binding predictions” from IEDB Analysis (http://www.immuneepitope.org/). The prediction was performed for the eleven human MHC II types HLADRB1*0101, *0301, *0401, *0404, *0405, *0701, *0802, *1101, *1302, *1501 and HLADRB5*0101 with a consensus approach of three methods (ARB, SMM_align, Sturniolo). Epitopes with a consensus percentile up to 5 in any of the MHC II types were mapped (Zhang et al., 2008; Wang et al., 2008).
^{d}Number of clones selected by human immunoglobulin from bacterial display libraries matching the ORF.
^{e}Location of immunogenic region, based on sequence alignment with the clones selected by human immunoglobulin from bacterial display libraries matching the ORF.
^{f}Sequence identification numbers for nucleotide (SEQ ID NOs 1 to 214) and protein sequences (SEQ ID NOs 215 to 428).

TABLE 5
List of 47 Mcat isolates used for gene
distribution (PCR genotyping) analysis.

| Internal | Internal | | | |
|---|---|---|---|---|
| Intercell | Intercell | Supplier | | Geograph- |
| reference | reference | isolate | | ical |
| number A | number B | number | Species | origin |
| RH4 | RH4 | Not | M. catarrhalis | |
| | | applicable | | |
| 45 | I, E9 | 2554135 | M. catarrhalis | Spain |
| 39 | I, E3 | 2560117 | M. catarrhalis | Portugal |
| 2 | I, A2 | 1090124 | M. catarrhalis | Australia |
| 4 | I, A4 | 1090127 | M. catarrhalis | Australia |
| 5 | I, A5 | 1091216 | M. catarrhalis | Australia |
| 40 | I, E4 | 3681122 | M. catarrhalis | South Africa |
| 33 | I, D6 | 2084130 | M. catarrhalis | Japan |
| 34 | I, D7 | 2085119 | M. catarrhalis | Japan |
| 35 | I, D8 | 3079119 | M. catarrhalis | Japan |
| 41 | I, E5 | 1070122 | M. catarrhalis | South Korea |
| 42 | I, E6 | 1071124 | M. catarrhalis | South Korea |
| 43 | I, E7 | 2070120 | M. catarrhalis | South Korea |
| 56 | I, G2 | 3696117 | M. catarrhalis | Taiwan |
| 57 | I, G3 | 3696119 | M. catarrhalis | Taiwan |
| 58 | I, G4 | 3696126 | M. catarrhalis | Taiwan |
| 62 | I, G8 | 2660116 | M. catarrhalis | Turkey |
| 63 | I, G9 | 2660119 | M. catarrhalis | Turkey |
| 65 | I, H2 | 2660124 | M. catarrhalis | Turkey |
| 6 | I, A6 | 1510233 | M. catarrhalis | Belgium |
| 16 | I, B7 | 1502130 | M. catarrhalis | France |
| 17 | I, B8 | 3502122 | M. catarrhalis | France |
| 20 | I, C2 | 3502129 | M. catarrhalis | France |
| 21 | I, C3 | 3517132 | M. catarrhalis | Germany |
| 22 | I, C4 | 3518116 | M. catarrhalis | Germany |
| 23 | I, C5 | 3519121 | M. catarrhalis | Germany |
| 25 | I, C7 | 3522120 | M. catarrhalis | Germany |
| 27 | I, C9 | 3650122 | M. catarrhalis | Hungary |
| 28 | I, D1 | 3650134 | M. catarrhalis | Hungary |
| 29 | I, D2 | 1530120 | M. catarrhalis | Italy |
| 30 | I, D3 | 2530126 | M. catarrhalis | Italy |
| 31 | I, D4 | 3530121 | M. catarrhalis | Italy |
| 46 | I, F1 | 3552130 | M. catarrhalis | Spain |
| 47 | I, F2 | 3553117 | M. catarrhalis | Spain |
| 51 | I, F6 | 3590123 | M. catarrhalis | Sweden |
| 52 | I, F7 | 3590127 | M. catarrhalis | Sweden |
| 54 | I, F9 | 3590135 | M. catarrhalis | Sweden |
| 7 | I, A7 | 1041218 | M. catarrhalis | Brazil |
| 8 | I, A8 | 3041116 | M. catarrhalis | Brazil |
| 9 | I, A9 | 3041117 | M. catarrhalis | Brazil |
| 12 | I, B3 | 1023257 | M. catarrhalis | Canada |
| 13 | I, B4 | 2022135 | M. catarrhalis | Canada |
| 14 | I, B5 | 3020116 | M. catarrhalis | Canada |
| 66 | I, H3 | 1001118 | M. catarrhalis | United States |
| 67 | I, H4 | 1001207 | M. catarrhalis | United States |
| 68 | I, H5 | 1009124 | M. catarrhalis | United States |
| 69 | I, H6 | 1009125 | M. catarrhalis | United States |

The Mcat strain RH4 also used to construct the libraries was isolated from the blood of an infected patient (Christensen et al., 1994) and obtained from Arne Forsgren (Malmö University Hospital, Sweden). Other strains were obtained from GR Micro.

TABLE 6
Conservation of 214 open reading frames coding for antigenic proteins in 47 Mcat isolates

| | | | Positives |
|---|---|---|---|
| SEQ ID NOs | | | of 47 |
| (nt, aa) | MC ORF | Common Name | tested |
| 1, 215 | MCRH0005 | Putative uncharacterized protein - Psychrobacter s(strain PRwf-1) | 47 |
| 2, 216 | MCRH0052 | S. UDP-N-acetylmuramate--L-alanine ligase (EC 6.3.2.8) (UDP-N | 47 |
| | | acetylmuramoyl-L-alanine synthetase) - Psychrobacter arcticum | |
| 3, 217 | MCRH0079 | SSU ribosomal protein S2P - Psychrobacter cryohalolentis (strain K5) | 47 |
| 4, 218 | MCRH0082 | SMC protein (Fragment) - Terfezia boudieri | 47 |
| 5, 219 | MCRH0103 | C-terminal processing peptidase-1. Serine peptidase. MEROPS famil | 45 |
| | | S41A - Psychrobacter arcticum | |
| 6, 220 | MCRH0125 | S. DNA-directed RNA polymerase subunit beta′ (EC 2.7.7.6) (RNAP | 47 |
| | | subuni beta′) (Transcriptase subunit beta′) (RNA polymerase subunit | |
| | | beta′) - Psychrobacter s(strain PRwf-1) | |
| 7, 221 | MCRH0139 | S. DNA-directed RNA polymerase subunit beta (EC 2.7.7.6) (RNAP | 47 |
| | | subuni beta) (Transcriptase subunit beta) (RNA polymerase subunit beta) - | |
| | | Psychrobacter arcticum | |
| 8, 222 | MCRH0176 | — | 47 |
| 9, 223 | MCRH0211 | S. Shikimate dehydrogenase (EC 1.1.1.25) - Psychrobacter cryohalolentis | 47 |
| | | (strain K5) | |
| 10, 224 | MCRH0249 | Anthranilate synthase, component I (EC 4.1.3.27) - Psychrobacter | 47 |
| | | cryohalolentis (strain K5) | |
| 11, 225 | MCRH0267 | Putative uncharacterized protein - Moraxella catarrhalis | 47 |
| 12, 226 | MCRH0268 | Lactoferrin binding protein A - Moraxella catarrhalis | 46 |
| 13, 227 | MCRH0278 | Lactoferrin binding protein B - Moraxella catarrhalis | 29 |
| 14, 228 | MCRH0342 | Putative uncharacterized protein - Psychrobacter arcticum | 41 |
| 15, 229 | MCRH0357 | Lytic murein transglycosylase precursor - Psychrobacter s(strain PRwf-1) | 47 |
| 16, 230 | MCRH0372 | Electron transfer flavoprotein-ubiquinone oxidoreductase (EC 1.5.5.1) - | 47 |
| | | Psychrobacter arcticum | |
| 17, 231 | MCRH0391 | Putative uncharacterized protein - Psychrobacter arcticum | 46 |
| 18, 232 | MCRH0397 | Ribose-phosphate pyrophosphokinase (EC 2.7.6.1) - Psychrobacter | 46 |
| | | s(strain PRwf-1) | |
| 19, 233 | MCRH0432 | — | 47 |
| 20, 234 | MCRH0441 | Excinuclease ABC subunit A - Psychrobacter arcticum | 47 |
| 21, 235 | MCRH0448 | Nicotinate-nucleotide adenylyltransferase (EC 2.7.7.18) - Psychrobacter | 47 |
| | | arcticum | |
| 22, 236 | MCRH0464 | 8-amino-7-oxononanoate synthase (EC 2.3.1.47) - Acinetobacter s(strain | 46 |
| | | ADP1) | |
| 23, 237 | MCRH0477 | Multi-sensor hybrid histidine kinase precursor - Psychrobacter s(strain | 47 |
| | | PRwf-1) | |
| 24, 238 | MCRH0498 | Possible ATP-dependent DEAD/DEAH box RNA-helicase - | 47 |
| | | Psychrobacter arcticum | |
| 25, 239 | MCRH0512 | DNA-(Apurinic or apyrimidinic site) lyase/Formamidopyrimidine-DN | 47 |
| | | glycosylase (EC 4.2.99.18) (EC 3.2.2.23) - Psychrobacter cryohalolentis | |
| | | (strain K5) | |
| 26, 240 | MCRH0525 | Phenylalanyl-tRNA synthetase beta subunit (EC 6.1.1.20) - | 47 |
| | | Psychrobacter cryohalolentis (strain K5) | |
| 27, 241 | MCRH0546 | Putative uncharacterized protein - Pseudoalteromonas haloplanktis (strain | 47 |
| | | TAC 125) | |
| 28, 242 | MCRH0558 | Nitric oxide reductase large subunit-like protein - Psychrobacter s(strain | 47 |
| | | PRwf-1) | |
| 29, 243 | MCRH0580 | Ferredoxin-dependent glutamate synthase - Psychrobacter s(strain PRwf-1) | 46 |
| 30, 244 | MCRH0587 | Putative DNA helicase - Psychrobacter cryohalolentis (strain K5) | 47 |
| 31, 245 | MCRH0594 | Dihydrouridine synthase, DuS - Psychrobacter s(strain PRwf-1) | 47 |
| 32, 246 | MCRH0621 | Phosphoribosylformylglycinamidine synthase (EC 6.3.5.3) - | 47 |
| | | Psychrobacter s(strain PRwf-1) | |
| 33, 247 | MCRH0655 | Acriflavin resistance protein - Psychrobacter s(strain PRwf-1) | 47 |
| 34, 248 | MCRH0673 | ATP-dependent DNA helicase RecG (EC 3.6.1.—) - Psychrobacter s(strain | 47 |
| | | PRwf-1) | |
| 35, 249 | MCRH0682 | Sulfate adenylate transferase subunit 1 - Actinobacillus | 47 |
| | | pleuropneumoniae serotype 3 (strain JL03) | |
| 36, 250 | MCRH0704 | S. 3-ketoacyl-CoA thiolase (EC 2.3.1.16) (Fatty acid oxidation comple | 47 |
| | | subunit beta) (Beta-ketothiolase) (Acetyl-CoA acyltransferase) - | |
| | | Psychrobacter s(strain PRwf-1) | |
| 37, 251 | MCRH0744 | Prolyl endopeptidase - Vibrio parahaemolyticus | 43 |
| 38, 252 | MCRH0756 | — | 47 |
| 39, 253 | MCRH0759 | TonB-dependent receptor precursor - Haemophilus somnus (strain 2336) | 44 |
| | | (Histophilus somni (strain 2336)) | |
| 40, 254 | MCRH0780 | 2-oxoglutarate dehydrogenase E1 component (EC 1.2.4.2) - | 47 |
| | | Psychrobacter cryohalolentis (strain K5) | |
| 41, 255 | MCRH0790 | Succinate dehydrogenase subunit A (EC 1.3.5.1) - Psychrobacter s(strain | 47 |
| | | PRwf-1) | |
| 42, 256 | MCRH0808 | Putative uncharacterized protein - Mannheimia haemolytica PHL213 | 47 |
| 43, 257 | MCRH0815 | RNA binding S1 domain protein - Psychrobacter s(strain PRwf-1) | 34 |
| 44, 258 | MCRH0853 | Putative uncharacterized protein (EC 5.3.4.1) - Psychrobacter arcticum | 47 |
| 45, 259 | MCRH0867 | Dihydrodipicolinate reductase (EC 1.3.1.26) - Psychrobacter s(strain | 47 |
| | | PRwf-1) | |
| 46, 260 | MCRH0911 | Glutamate--cysteine ligase (EC 6.3.2.2) - Psychrobacter arcticum | 42 |
| 47, 261 | MCRH0917 | Putative UDP-N-acetylmuramate: L-alanyl-gamma-D-glutamyl-meso | 46 |
| | | diaminopimelate ligase - Psychrobacter arcticum | |
| 48, 262 | MCRH1023 | Putative uncharacterized protein - Acinetobacter baumannii | 47 |
| 49, 263 | MCRH1076 | L-threonine synthase (EC 4.2.3.1) - Psychrobacter s(strain PRwf-1) | 43 |
| 50, 264 | MCRH1163 | Putative uncharacterized protein - Deinococcus radiodurans | 46 |
| 51, 265 | MCRH1198 | DNA repair protein RecN - Psychrobacter cryohalolentis (strain K5) | 47 |
| 52, 266 | MCRH1227 | MFS cyanate efflux pump, CynX - Psychrobacter arcticum | 47 |
| 53, 267 | MCRH1256 | Putative ComEA protein-related protein - Candidatus Cloacamonas | 47 |
| | | acidaminovorans | |
| 54, 268 | MCRH1257 | Poly(A) polymerase - Psychrobacter s(strain PRwf-1) | 47 |
| 55, 269 | MCRH1303 | Putative hemolysin-related protein - Acinetobacter baumannii | 47 |
| 56, 270 | MCRH1397 | Thiamin-monophosphate kinase (EC 2.7.4.16) - Acinetobacter s(strain | 46 |
| | | ADP1) | |
| 57, 271 | MCRH1430 | S-adenosyl-methyltransferase MraW - Psychrobacter s(strain PRwf-1) | 33 |
| 58, 272 | MCRH1438 | Putative uncharacterized protein - Psychrobacter cryohalolentis (strain K5) | 47 |
| 59, 273 | MCRH1440 | Peptidoglycan synthetase FtsI (EC 2.4.1.129) - Psychrobacter s(strain | 47 |
| | | PRwf-1) | |
| 60, 274 | MCRH1475 | S. Translation initiation factor IF-2 - Psychrobacter s(strain PRwf-1) | 45 |
| 61, 275 | MCRH1486 | S. Ribosome-binding factor A - Psychrobacter arcticum | 46 |
| 62, 276 | MCRH1493 | OlpA - Moraxella catarrhalis | 47 |
| 63, 277 | MCRH1546 | — | 46 |
| 64, 278 | MCRH1561 | Sulphate transporter - Psychrobacter s(strain PRwf-1) | 44 |
| 65, 279 | MCRH1565 | Probable zinc metallopeptidases, family M48 - Psychrobacter arcticum | 47 |
| 66, 280 | MCRH1568 | Phosphate ABC transporter, periplasmic phosphate-binding protein - | 38 |
| | | Psychrobacter s(strain PRwf-1) | |
| 67, 281 | MCRH1577 | Phosphate ABC transporter, ATPase subunit precursor - Psychrobacter | 44 |
| | | s(strain PRwf-1) | |
| 68, 282 | MCRH1586 | Ppx/GppA phosphatase (EC 3.6.1.40) - Psychrobacter s(strain PRwf-1) | 47 |
| 69, 283 | MCRH1671 | GTP-binding protein Era - Psychrobacter s(strain PRwf-1) | 47 |
| 70, 284 | MCRH1677 | Outer membrane protein CD precursor (OmpCD) - Moraxella catarrhalis | 47 |
| 71, 285 | MCRH1696 | Extracellular solute-binding protein, family 3 precursor - Psychrobacter | 47 |
| | | s(strain PRwf-1) | |
| 72, 286 | MCRH1701 | Extracellular solute-binding protein, family 3 precursor - Psychrobacter | 44 |
| | | s(strain PRwf-1) | |
| 73, 287 | MCRH1705 | ABC transporter related - Psychrobacter s(strain PRwf-1) | 46 |
| 74, 288 | MCRH1720 | DNA topoisomerase I (EC 5.99.1.2) - Psychrobacter s(strain PRwf-1) | 47 |
| 75, 289 | MCRH1732 | DNA polymerase I (EC 2.7.7.7) - Psychrobacter s(strain PRwf-1) | 47 |
| 76, 290 | MCRH1742 | S. Peptide chain release factor 3 (RF-3) - Psychrobacter s(strain PRwf-1) | 47 |
| 77, 291 | MCRH1777 | Uncharacterized iron-regulated membrane protein-like protein - | 47 |
| | | Psychrobacter s(strain PRwf-1) | |
| 78, 292 | MCRH1841 | McmA - Moraxella catarrhalis | 47 |
| 79, 293 | MCRH1853 | HI0933 family protein - Psychrobacter s(strain PRwf-1) | 47 |
| 80, 294 | MCRH1878 | S. Glycyl-tRNA synthetase alpha subunit (EC 6.1.1.14) (Glycine--tRN | 47 |
| | | ligase alpha subunit) (GlyRS) - Moraxella catarrhalis | |
| 81, 295 | MCRH1934 | RNAse E (EC 3.1.4.—) - Psychrobacter s(strain PRwf-1) | 47 |
| 82, 296 | MCRH2003 | Phospholipid/glycerol acyltransferase precursor - Psychrobacter | 47 |
| | | cryohalolentis (strain K5) | |
| 83, 297 | MCRH2082 | S. 30S ribosomal protein S11 - Psychrobacter s(strain PRwf-1) | 47 |
| 84, 298 | MCRH2139 | UDP-N-acetylmuramoylalanine-D-glutamate ligase (EC 6.3.2.9) - | 47 |
| | | Acinetobacter baumannii | |
| 85, 299 | MCRH2151 | Probable DNA/RNA non-specific endonuclease (Mg-dependent) - | 44 |
| | | Psychrobacter arcticum | |
| 86, 300 | MCRH2184 | Mg chelatase, subunit ChlI - Psychrobacter s(strain PRwf-1) | 47 |
| 87, 301 | MCRH2216 | Selenocysteine synthase (EC 2.9.1.1) - Haemophilus influenzae (strain | 21 |
| | | PittEE) | |
| 88, 302 | MCRH2239 | Putative uncharacterized protein - Pseudomonas fluorescens (strain PfO-1) | 27 |
| 89, 303 | MCRH2257 | S. 10 kDa chaperonin (Protein Cpn10) (groES protein) - Psychrobacter | 47 |
| | | s(strain PRwf-1) | |
| 90, 304 | MCRH2276 | Monooxygenase - Neisseria meningitidis serogroup C (strain 053442) | 46 |
| 91, 305 | MCRH2384 | S. Threonyl-tRNA synthetase (EC 6.1.1.3) (Threonine--tRNA ligase | 47 |
| | | (ThrRS) - Psychrobacter s(strain PRwf-1) | |
| 92, 306 | MCRH2399 | — | 47 |
| 93, 307 | MCRH2415 | Lytic transglycosylase, catalytic precursor - Psychrobacter s(strain PRwf-1) | 47 |
| 94, 308 | MCRH2484 | Acetyl-coenzyme A carboxylase carboxyl transferase subunit alpha - | 46 |
| | | Psychrobacter arcticum | |
| 95, 309 | MCRH2496 | Possible Peptidoglycan-binding LysM - Psychrobacter arcticum | 47 |
| 96, 310 | MCRH2506 | Msp22 (Fragment) - Moraxella catarrhalis | 47 |
| 97, 311 | MCRH2519 | S. 1-deoxy-D-xylulose-5-phosphate synthase (EC 2.2.1.7) (1- | 47 |
| | | deoxyxylulose 5-phosphate synthase) (DXP synthase) (DXPS) - | |
| | | Psychrobacter cryohalolentis (strain K5) | |
| 98, 312 | MCRH2553 | S. Cysteinyl-tRNA synthetase (EC 6.1.1.16) (Cysteine--tRNA ligase | 47 |
| | | (CysRS) - Psychrobacter cryohalolentis (strain K5) | |
| 99, 313 | MCRH2560 | Putative cytochrome c, class I precursor - Psychrobacter cryohalolentis | 47 |
| | | (strain K5) | |
| 100, 314 | MCRH2592 | S. Ribonuclease PH (EC 2.7.7.56) (RNase PH) (tRN | 45 |
| | | nucleotidyltransferase) - Psychrobacter s(strain PRwf-1) | |
| 101, 315 | MCRH2606 | Outer membrane protein G1b - Moraxella catarrhalis | 47 |
| 102, 316 | MCRH2612 | Probable aminopeptidase N (EC 3.4.11.2) - Psychrobacter arcticum | 46 |
| 103, 317 | MCRH2625 | Periplasmic protein - Neisseria meningitidis serogroup C (strain 053442) | 47 |
| 104, 318 | MCRH2627 | GDSL-like lipase/ccylhydrolase family protein - Pseudomonas | 47 |
| | | fluorescens (strain Pf-5/ATCC BAA-477) | |
| 105, 319 | MCRH2641 | Putative uncharacterized protein - Psychrobacter cryohalolentis (strain K5) | 47 |
| 106, 320 | MCRH2669 | Cytochrome c1 precursor - Psychrobacter s(strain PRwf-1) | 47 |
| 107, 321 | MCRH2682 | S. tRNA uridine 5-carboxymethylaminomethyl modification enzyme gid | 47 |
| | | (Glucose-inhibited division protein A) - Psychrobacter arcticum | |
| 108, 322 | MCRH2754 | Probable Transcription regulator, LysR family - Psychrobacter arcticum | 46 |
| 109, 323 | MCRH2759 | 4Fe—4S ferredoxin, iron-sulfur binding - Psychrobacter cryohalolentis | 47 |
| | | (strain K5) | |
| 110, 324 | MCRH2783 | Cytochrome c oxidase cbb3-type, subunit III (EC 1.9.3.1) - | 43 |
| | | Psychrobacter arcticum | |
| 111, 325 | MCRH2844 | Oligopeptide-binding protein oppA - Streptococcus pyogenes serotype | 47 |
| | | M2 (strain MGAS10270) | |
| 112, 326 | MCRH2851 | Putative uncharacterized protein - Psychrobacter s(strain PRwf-1) | 47 |
| 113, 327 | MCRH2861 | S. Leucyl-tRNA synthetase (EC 6.1.1.4) (Leucine--tRNA ligase) | 47 |
| | | (LeuRS) - Psychrobacter cryohalolentis (strain K5) | |
| 114, 328 | MCRH2874 | Sulfatase domain protein - Dichelobacter nodosus (strain VCS1703A) | 47 |
| 115, 329 | MCRH2891 | Na+ symporter - Marinomonas s(strain MWYL1) | 45 |
| 116, 330 | MCRH2904 | Glycine dehydrogenase (Decarboxylating) beta subunit/glycin | 47 |
| | | dehydrogenase (Decarboxylating) alpha subunit (EC 1.4.4.2) - | |
| | | Psychrobacter s(strain PRwf-1) | |
| 117, 331 | MCRH2916 | S. Aminomethyltransferase (EC 2.1.2.10) (Glycine cleavage system | 47 |
| | | protein) - Neisseria meningitidis serogroup B | |
| 118, 332 | MCRH2935 | Putative lipoprotein - Bordetella petrii (strain ATCC BAA-461/DSM | 47 |
| | | 12804/CCUG 43448) | |
| 119, 333 | MCRH3006 | Aspartate semialdehyde dehydrogenase (EC 1.2.1.11) - Psychrobacter | 47 |
| | | arcticum | |
| 120, 334 | MCRH3022 | Probable cytochrome C-type biogenesis protein - Psychrobacter arcticum | 42 |
| 121, 335 | MCRH3030 | Putative uncharacterized protein - Psychrobacter arcticum | 47 |
| 122, 336 | MCRH3040 | Putative uncharacterized protein - Psychrobacter arcticum | 47 |
| 123, 337 | MCRH3120 | 2-isopropylmalate synthase - Psychrobacter cryohalolentis (strain K5) | 44 |
| 124, 338 | MCRH3128 | UspA1 - Moraxella catarrhalis | 44 |
| 125, 339 | MCRH3146 | Putative uncharacterized protein - Alteromonadales bacterium TW-7 | 47 |
| 126, 340 | MCRH3327 | DsrE-like protein - Psychrobacter cryohalolentis (strain K5) | 47 |
| 127, 341 | MCRH3328 | Glutamate-ammonia-ligase adenylyltransferase (EC 2.7.7.42) - | 46 |
| | | Psychrobacter cryohalolentis (strain K5) | |
| 128, 342 | MCRH3363 | Aminotransferase (EC 2.6.1.—) - Psychrobacter s(strain PRwf-1) | 47 |
| 129, 343 | MCRH3380 | Carbamoyl-phosphate synthase, large subunit (EC 6.3.5.5) - | 47 |
| | | Acinetobacter baumannii | |
| 130, 344 | MCRH3399 | Peptidase M23B precursor - Psychrobacter cryohalolentis (strain K5) | 46 |
| 131, 345 | MCRH3401 | PpiC-type peptidyl-prolyl cis-trans isomerase precursor - Psychrobacter | 47 |
| | | cryohalolentis (strain K5) | |
| 132, 346 | MCRH3404 | S. LPS-assembly protein precursor (Organic solvent tolerance protein) - | 47 |
| | | Psychrobacter cryohalolentis (strain K5) | |
| 133, 347 | MCRH3409 | Aminoglycoside phosphotransferase - Psychrobacter cryohalolentis | 46 |
| | | (strain K5) | |
| 134, 348 | MCRH3501 | Phospholipase D/Transphosphatidylase - Psychrobacter s(strain PRwf-1) | 47 |
| 135, 349 | MCRH3534 | ABC transporter related - Psychrobacter s(strain PRwf-1) | 47 |
| 136, 350 | MCRH3547 | Putative uncharacterized protein PM0287 - Pasteurella multocida | 46 |
| 137, 351 | MCRH3567 | Nucleoside-diphosphate-sugar epimerase-like protein - Psychrobacter | 47 |
| | | s(strain PRwf-1) | |
| 138, 352 | MCRH3578 | DNA gyrase subunit A (EC 5.99.1.3) - Psychrobacter s(strain PRwf-1) | 47 |
| 139, 353 | MCRH3622 | L-serine dehydratase 1 (EC 4.3.1.17) - Psychrobacter s(strain PRwf-1) | 47 |
| 140, 354 | MCRH3635 | Alanine racemase (EC 5.1.1.1) - Psychrobacter cryohalolentis (strain K5) | 47 |
| 141, 355 | MCRH3705 | Na+/H+ antiporter NhaC - Psychrobacter cryohalolentis (strain K5) | 46 |
| 142, 356 | MCRH3709 | Peptidase S11, D-alanyl-D-alanine carboxypeptidase 1 precursor - | 47 |
| | | Psychrobacter s(strain PRwf-1) | |
| 143, 357 | MCRH3729 | Probable membrane-bound lytic murein transglycosylase D - | 47 |
| | | Psychrobacter arcticum | |
| 144, 358 | MCRH3742 | Putative DNA repair protein radA - Psychrobacter arcticum | 46 |
| 145, 359 | MCRH3759 | — | 47 |
| 146, 360 | MCRH3844 | Putative uncharacterized protein - Mannheimia succiniciproducens | 26 |
| | | (strain MBEL55E) | |
| 147, 361 | MCRH3884 | Putative uncharacterized protein - Mannheimia haemolytica PHL213 | 35 |
| 148, 362 | MCRH3895 | Transcriptional regulator - Pseudomonas phage F116 | 1 |
| 149, 363 | MCRH3907 | Putative uncharacterized protein - Psychrobacter s(strain PRwf-1) | 47 |
| 150, 364 | MCRH3939 | Possible membrane-bound lytic murein transglycosylase - Psychrobacter | 45 |
| | | arcticum | |
| 151, 365 | MCRH3966 | Probable Insulinase-like peptidase, family M16 - Psychrobacter arcticum | 46 |
| 152, 366 | MCRH3969 | Probable Insulinase-like peptidase, family M16 - Psychrobacter arcticum | 47 |
| 153, 367 | MCRH3996 | KpsF/GutQ family protein (EC 5.3.1.13) - Psychrobacter s(strain PRwf-1) | 44 |
| 154, 368 | MCRH4056 | Pyruvate dehydrogenase complex dihydrolipoamide acetyltransferas (EC | 46 |
| | | 2.3.1.61) - Psychrobacter s(strain PRwf-1) | |
| 155, 369 | MCRH4147 | SSU ribosomal protein S1P - Psychrobacter s(strain PRwf-1) | 47 |
| 156, 370 | MCRH4174 | ABC transporter related - Psychrobacter s(strain PRwf-1) | 46 |
| 157, 371 | MCRH4206 | Ribonucleoside-diphosphate reductase class Ia alpha subuni (EC | 46 |
| | | 1.17.4.1) - Psychrobacter s(strain PRwf-1) | |
| 158, 372 | MCRH4291 | Chromosome segregation DNA-binding protein - Psychrobacter arcticum | 41 |
| 159, 373 | MCRH4304 | Putative uncharacterized protein - Psychrobacter arcticum | 47 |
| 160, 374 | MCRH4322 | S. Adenylosuccinate synthetase (EC 6.3.4.4) (IMP--aspartate ligase | 8 |
| | | (AdSS) (AMPSase) - Psychrobacter cryohalolentis (strain K5) | |
| 161, 375 | MCRH4367 | L-aspartate oxidase (EC 1.4.3.16) - Limnobacter sMED105 | 46 |
| 162, 376 | MCRH4378 | Putative nicotinate-nucleotide pyrophosphorylase (EC 2.4.2.19) - | 46 |
| | | Neisseria gonorrhoeae (strain ATCC 700825/FA 1090) | |
| 163, 377 | MCRH4392 | Msp75 (Fragment) - Moraxella catarrhalis | 47 |
| 164, 378 | MCRH4469 | Molybdate transport protein (ABC superfamily, peri_bind) - | 47 |
| | | Acinetobacter baumannii | |
| 165, 379 | MCRH4491 | Respiratory nitrate reductase beta subunit - Psychrobacter s(strain PRwf-1) | 47 |
| 166, 380 | MCRH4496 | Respiratory nitrate reductase alpha subunit apoprotein - Psychrobacter | 45 |
| | | arcticum | |
| 167, 381 | MCRH4526 | Hemoglobin utilization protein (Fragment) - Moraxella catarrhalis | 46 |
| 168, 382 | MCRH4552 | S. UPF0082 protein Psyc_0938 - Psychrobacter arcticum | 38 |
| 169, 383 | MCRH4568 | Protein tyrosine phosphatase - Reinekea sMED297 | 47 |
| 170, 384 | MCRH4629 | NADH-quinone oxidoreductase (EC 1.6.99.5) - Psychrobacter s(strain | 47 |
| | | PRwf-1) | |
| 171, 385 | MCRH4641 | NADH-quinone oxidoreductase, F subunit (EC 1.6.99.5) - Psychrobacter | 46 |
| | | s(strain PRwf-1) | |
| 172, 386 | MCRH4697 | Transferrin binding protein B - Moraxella catarrhalis | 45 |
| 173, 387 | MCRH4706 | Putative uncharacterized protein - Moraxella catarrhalis | 45 |
| 174, 388 | MCRH4712 | Hypothetical periplasmic protein - Neisseria meningitidis serogroup C | 46 |
| | | (strain 053442) | |
| 175, 389 | MCRH4716 | Transferrin binding protein A - Moraxella catarrhalis | 47 |
| 176, 390 | MCRH4730 | Methionine-R-sulfoxide reductase (EC 1.8.4.11) - Psychrobacter s(strain | 47 |
| | | PRwf-1) | |
| 177, 391 | MCRH4740 | Lytic transglycosylase, catalytic precursor - Psychrobacter s(strain PRwf-1) | 45 |
| 178, 392 | MCRH4750 | RNA polymerase sigma factor - Psychrobacter s(strain PRwf-1) | 46 |
| 179, 393 | MCRH4908 | Probable penicillin-binding protein transpeptidase domain - | 47 |
| | | Psychrobacter arcticum | |
| 180, 394 | MCRH4917 | Acid phosphatase autotransporter - Moraxella catarrhalis | 47 |
| 181, 395 | MCRH4930 | Adhesin - Moraxella catarrhalis | 47 |
| 182, 396 | MCRH4983 | Heat shock protein 70 - Psychrobacter cryohalolentis (strain K5) | 46 |
| 183, 397 | MCRH5027 | Alanyl-tRNA synthetase (EC 6.1.1.7) - Psychrobacter s(strain PRwf-1) | 47 |
| 184, 398 | MCRH5073 | Flavin reductase (EC 1.5.1.30) - Mannheimia haemolytica PHL213 | 41 |
| 185, 399 | MCRH5107 | Putative uncharacterized protein precursor - Psychrobacter s(strain PRwf-1) | 44 |
| 186, 400 | MCRH5149 | Surface antigen (D15) precursor - Psychrobacter s(strain PRwf-1) | 47 |
| 187, 401 | MCRH5176 | S. Uridylate kinase (EC 2.7.4.22) (UK) (Uridine monophosphate kinase | 47 |
| | | (UMP kinase) (UMPK) - Psychrobacter cryohalolentis (strain K5) | |
| 188, 402 | MCRH5178 | Transketolase (EC 2.2.1.1) - Acinetobacter baumannii | 47 |
| 189, 403 | MCRH5224 | Valyl-tRNA synthetase - Psychrobacter cryohalolentis (strain K5) | 46 |
| 190, 404 | MCRH5239 | Putative uncharacterized protein precursor - Psychrobacter s(strain PRwf-1) | 46 |
| 191, 405 | MCRH5260 | Putative amino-acid transport protein - Neisseria gonorrhoeae (strain | 47 |
| | | ATCC 700825/FA 1090) | |
| 192, 406 | MCRH5275 | Isoleucyl-tRNA synthetase (EC 6.1.1.5) - Psychrobacter s(strain PRwf-1) | 47 |
| 193, 407 | MCRH5294 | Major outer membrane protein - Moraxella catarrhalis | 47 |
| 194, 408 | MCRH5308 | Putative thiol: disulfide interchange protein precursor - Psychrobacter | 47 |
| | | cryohalolentis (strain K5) | |
| 195, 409 | MCRH5342 | RND efflux system, outer membrane lipoprotein, NodT - Psychrobacter | 47 |
| | | cryohalolentis (strain K5) | |
| 196, 410 | MCRH5355 | Secretion protein HlyD precursor - Psychrobacter cryohalolentis (strain K5) | 47 |
| 197, 411 | MCRH5441 | Putative uncharacterized protein - Psychrobacter arcticum | 47 |
| 198, 412 | MCRH5451 | Alcohol dehydrogenase class III/S-(Hydroxymethyl)glutathion | 47 |
| | | dehydrogenase - Actinobacillus succinogenes (strain ATCC 55618/ | |
| | | 130Z) | |
| 199, 413 | MCRH5471 | Probable penicillin-binding protein 1A - Psychrobacter arcticum | 47 |
| 200, 414 | MCRH5547 | Phosphoribosylaminoimidazole carboxylase, catalytic subuni (EC | 47 |
| | | 4.1.1.21) - Psychrobacter s(strain PRwf-1) | |
| 201, 415 | MCRH5559 | Putative uncharacterized protein - Moraxella nonliquefaciens | 47 |
| 202, 416 | MCRH5574 | Dihydroorotase (EC 3.5.2.3) - Psychrobacter s(strain PRwf-1) | 38 |
| 203, 417 | MCRH5581 | Sel1 domain protein repeat-containing protein - Candidatus | 28 |
| | | Amoebophilus asiaticus 5a2 | |
| 204, 418 | MCRH5639 | Aconitate hydratase 2 (EC 4.2.1.3) - Acinetobacter baumannii | 47 |
| 205, 419 | MCRH5640 | Aconitate hydratase 2 (EC 4.2.1.3) - Acinetobacter baumannii | 47 |
| 206, 420 | MCRH5644 | Aconitate hydratase 2 (EC 4.2.1.3) - Acinetobacter baumannii | 47 |
| 207, 421 | MCRH5729 | S. UvrABC system protein C (Protein uvrC) (Excinuclease ABC subunit | 47 |
| | | C) - Psychrobacter cryohalolentis (strain K5) | |
| 208, 422 | MCRH5753 | Aminobutyrate aminotransferase - Moraxella catarrhalis | 47 |
| 209, 423 | MCRH5785 | Putative uncharacterized protein - Neisseria gonorrhoeae (strain ATCC | 46 |
| | | 700825/FA 1090) | |
| 210, 424 | MCRH5787 | Replication restart DNA helicase PriA - Psychrobacter arcticum | 47 |
| 211, 425 | MCRH5838 | Ubiquitous surface protein A2H - Moraxella catarrhalis | 46 |
| 212, 426 | MCRH5853 | Putative isocitrate dehydrogenase (EC 1.1.1.42) - Neisseria meningitidis | 46 |
| | | serogroup C/serotype 2a (strain ATCC 700532 - FAM18) | |
| 213, 427 | MCRH5872 | Alpha/beta hydrolase fold - Psychrobacter cryohalolentis (strain K5) | 47 |
| 214, 428 | MCRH5882 | Probable HesA/MoeB/ThiF family protein - Psychrobacter arcticum | 47 |

A total number of 47 Mcat isolates, including the RH4 isolate also used for library construction as a positive PCR control, were tested by PCR with oligonucleotides specific for the genes encoding relevant antigens.
The table lists the number of positive PCR results for the 47 Mcat isolates tested.

TABLE 7
PCR primer sequences used for the analysis
of the conservation in 47 Mcat isolates of
the 214 immunogenic Mcat ORFs identified by
screening bacterial display libraries of the
fragmented genome of Mcat RH4 with human
immunoglobulin
The table provides sequences for the
oligonucleotide primers used to examine
the conservation of 214 antigenic Mcat
ORFs, by PCR. The table lists a total
of 214 PCR primer pairs, i.e. 428
oligonucleotide sequences.

| | | Oligonucleo- | |
|---|---|---|---|
| | | tide name | PCR |
| SEQ | | (ORF | pro- |
| ID | DNA oligonucleotide | name_oligo | duct |
| NO | sequence (5′-3′) | sense) | size |
| 429 | CTAATACCAAAATACCCGTTTG | MCRH0005_fwd | 1277 |
| 430 | CAGGCTCAATCACCTCAAAG | MCRH0005_rev | |
| 431 | CAATCATGAAAACATCAATGG | MCRH0052_fwd | 1055 |
| 432 | GTGAAATGGGTTTTTGTGC | MCRH0052_rev | |
| 433 | GGACTTTTTGATAAGAATTTGC | MCRH0079_fwd | 1197 |
| 434 | GATATCACCGCCTGCTTC | MCRH0079_rev | |
| 435 | GATAATTATGACAAAAGCTGGTTG | MCRH0082_fwd | 1123 |
| 436 | GATGTCATTGATTTGCTCATCC | MCRH0082_rev | |
| 437 | CAGCCATGATACCCAAAAAG | MCRH0103_fwd | 1088 |
| 438 | CTTATTTGTGATCGGCTTTG | MCRH0103_rev | |
| 439 | CATGCGTACTTTCCATGTC | MCRH0125_fwd | 957 |
| 440 | ATCTGACGAACGATGACTTC | MCRH0125_rev | |
| 441 | CTCAGGTATGACCAAGCTCG | MCRH0139_fwd | 1094 |
| 442 | GACGAACACTAACCATCTCTTC | MCRH0139_rev | |
| 443 | CATTGTCAAACTGTCAGAAGG | MCRH0176_fwd | 787 |
| 444 | GTTTAGACCTTCATCACGCTC | MCRH0176_rev | |
| 445 | GCTTGCTGGATTAGCATACC | MCRH0211_fwd | 924 |
| 446 | CAGATCAGCCAAGTTTTACG | MCRH0211_rev | |
| 447 | CTTCAGCCCATCAAAGACG | MCRH0249_fwd | 1088 |
| 448 | GCCTTTTGACCGAAGATG | MCRH0249_rev | |
| 449 | ACTTAGGGCAAGTTTACTTTGG | MCRH0267_fwd | 657 |
| 450 | ATGTATTAAACACCCGCTACAC | MCRH0267_rev | |
| 451 | GAAGAAAAAGACGCCTGTGG | MCRH0268_fwd | 1033 |
| 452 | GGGTGTTTAATACATTGTTGATACC | MCRH0268_rev | |
| 453 | CCACAAAAACGGTGTATTTTAG | MCRH0278_fwd | 956 |
| 454 | GACGATATCACCTCTCTCATCG | MCRH0278_rev | |
| 455 | GACCCAATGTGGTAATCGTC | MCRH0342_fwd | 1100 |
| 456 | GCCAAATTTATTGAACCTAAGC | MCRH0342_rev | |
| 457 | GGCGTCTTTGGTAGACAGTG | MCRH0357_fwd | 1006 |
| 458 | CGTGTATTATCACCGATGATG | MCRH0357_rev | |
| 459 | GTATTTGGCAAGCAGTTCG | MCRH0372_fwd | 782 |
| 460 | CATAATCCAAGCCATTTTATCC | MCRH0372_rev | |
| 461 | GCTTGTTCTTGGTAATCACG | MCRH0391_fwd | 1046 |
| 462 | GCTTTGACAATGAGATTTTGG | MCRH0391_rev | |
| 463 | CCAAGATTTTTCTATTTAACCAAG | MCRH0397_fwd | 1293 |
| 464 | GTTGATAGATTGGCATACCG | MCRH0397_rev | |
| 465 | CGCTCATATACAATTTGCTG | MCRH0432_fwd | 927 |
| 466 | CAAAACTGTCCTCAATCTGC | MCRH0432_rev | |
| 467 | GATATTGGCGTTGGAGCAG | MCRH0441_fwd | 811 |
| 468 | CCACCTCATGCAGTGCTTC | MCRH0441_rev | |
| 469 | CTTTCAACATAACGGCGTTG | MCRH0448_fwd | 1172 |
| 470 | CACAAATAACGATGCGTTCAG | MCRH0448_rev | |
| 471 | CTTACCTGCCATTTGTGATG | MCRH0464_fwd | 1088 |
| 472 | GCATCGGTTAAAAGACCAC | MCRH0464_rev | |
| 473 | GCTTGGTGTTGAGGTTGTTAC | MCRH0477_fwd | 1055 |
| 474 | CATCAAGTCGATCGTATCATTC | MCRH0477_rev | |
| 475 | CCATTGATAAGATCCCAAGG | MCRH0498_fwd | 1225 |
| 476 | GACGATTGTCATCGATACTGC | MCRH0498_rev | |
| 477 | CATATGAAGTTTTATGTTGAGGTG | MCRH0512_fwd | 1184 |
| 478 | GGCAGATATGCTTGATGAGC | MCRH0512_rev | |
| 479 | GTGGTATGGTACATCCACAAG | MCRH0525_fwd | 1260 |
| 480 | GGTCAACCGATCAAAATGTG | MCRH0525_rev | |
| 481 | CAAAAACTTGAAAGCACAAAAG | MCRH0546_fwd | 1156 |
| 482 | GCAGGCACTCAAAAGTAGG | MCRH0546_rev | |
| 483 | CTTAAGACATGAGCCTAACTGG | MCRH0558_fwd | 1077 |
| 484 | CTTAATGGGTCTTGTTTTGGTAC | MCRH0558_rev | |
| 485 | CTGAAATTGCATTGACTCGTG | MCRH0580_fwd | 1076 |
| 486 | GATAAACACCACCCAAAACC | MCRH0580_rev | |
| 487 | GGACGCTATAGGCTGTCTAATC | MCRH0587_fwd | 1102 |
| 488 | GGCTAAGATTGAAGATTGATTG | MCRH0587_rev | |
| 489 | CGACTATGTCGTCTCAACTGC | MCRH0594_fwd | 1399 |
| 490 | GTAAAACAAGGCGAGTATTTGG | MCRH0594_rev | |
| 491 | CAACAGGGCAGGTATCGG | MCRH0621_fwd | 997 |
| 492 | CCAACATATTGATCTTGGGTAAC | MCRH0621_rev | |
| 493 | GATTTTTTATTGCCTCGCT | MCRH0655_fwd | 802 |
| 494 | GCTAATACTTGCCTCACCTG | MCRH0655_rev | |
| 495 | GGTTAGTCGCTACGGTACACAG | MCRH0673_fwd | 782 |
| 496 | GCACCTGATTTTTTCTGATGG | MCRH0673_rev | |
| 497 | GCACGCTCATCAAACCAAC | MCRH0682_fwd | 721 |
| 498 | CACGCAATATGGTTACTGGTG | MCRH0682_rev | |
| 499 | GCATTGTGCGATAAGTACG | MCRH0704_fwd | 1442 |
| 500 | GTCAAAATGCGCATCTTG | MCRH0704_rev | |
| 501 | CGGTTTATAAATACAGCCCATC | MCRH0744_fwd | 1158 |
| 502 | CTTTCTGAGCGTTATTATCATGG | MCRH0744_rev | |
| 503 | CTTAGGCGTCTGAATGAAACC | MCRH0756_fwd | 1083 |
| 504 | GCTTGACCAACATTACCGC | MCRH0756_rev | |
| 505 | GTACAACAACCTCAGGCGAG | MCRH0759_fwd | 564 |
| 506 | GCCCTTCTTTGGTCAAATAC | MCRH0759_rev | |
| 507 | CCCTTGTTATCTTTATCCAAATG | MCRH0780_fwd | 1102 |
| 508 | CAAGGTGTGATGGGTTAAATG | MCRH0780_rev | |
| 509 | CATGGACATGACGCACTTAG | MCRH0790_fwd | 1099 |
| 510 | CGCTTTAGGCGAAGTAAAAC | MCRH0790_rev | |
| 511 | CAAACGTAAATAATCCGCTTC | MCRH0808_fwd | 1112 |
| 512 | CAAATCGGCAAATCATAAGC | MCRH0808_rev | |
| 513 | CCGTTATCAGAATTGGTCAAG | MCRH0815_fwd | 1227 |
| 514 | CGATGTCAGCATCTTCGTG | MCRH0815_rev | |
| 515 | CCGAGGGTAAATATCATCAAG | MCRH0853_fwd | 1371 |
| 516 | GTTGATGCCCCCATTTATC | MCRH0853_rev | |
| 517 | GTATTGGGCTTGAATCACCC | MCRH0867_fwd | 1099 |
| 518 | GGATACTCGCTATGGTGGAC | MCRH0867_rev | |
| 519 | CCATTGACTACACCGAAGG | MCRH0911_fwd | 1064 |
| 520 | CAAAATCAGCATAAGGCGTTC | MCRH0911_rev | |
| 521 | CAGCTCATATTTAGGCAAGC | MCRH0917_fwd | 1112 |
| 522 | GATTGGGCCATTTTGATAC | MCRH0917_rev | |
| 523 | CACGCATCATGAATGAAATC | MCRH1023_fwd | 1067 |
| 524 | CTCTTTCATCCAGCACAAAC | MCRH1023_rev | |
| 525 | CGGTAATGGATTGGTATTATC | MCRH1076_fwd | 1332 |
| 526 | GCAACTTTTACACCATCAGC | MCRH1076_rev | |
| 527 | GCTTGATAGTTACCAAAGTCTTATTG | MCRH1163_fwd | 1446 |
| 528 | CGCATCACAAAACATCTTGC | MCRH1163_rev | |
| 529 | GTTAAAAAGGCACTCAAAGCAC | MCRH1198_fwd | 1084 |
| 530 | GATGTGCAAGGCTCAATAAG | MCRH1198_rev | |
| 531 | GTTGATGGGGTAGAATTTGC | MCRH1227_fwd | 1081 |
| 532 | GCCATAAAATGGCAAGTGG | MCRH1227_rev | |
| 533 | GCTAAGCGGTAATCAAAAGC | MCRH1256_fwd | 791 |
| 534 | CTCTTTTTGGTTTGTTTTGG | MCRH1256_rev | |
| 535 | GTATCGCAGCAGACAAAAGTG | MCRH1257_fwd | 1037 |
| 536 | GTTTGAAGGCTTGTACGGC | MCRH1257_rev | |
| 537 | GTCGTTTGTTTTGGTAACACTG | MCRH1303_fwd | 1207 |
| 538 | CAAAATTTGTAACAGCAGATGG | MCRH1303_rev | |
| 539 | CCACCCTTGTACTGTTAAATCC | MCRH1397_fwd | 846 |
| 540 | CTGGTCAGCTGTGTGGATACC | MCRH1397_rev | |
| 541 | GATAAACTTCCCACAACTCTTTG | MCRH1430_fwd | 1254 |
| 542 | GTTTTGGTTGTGATGATTTTTG | MCRH1430_rev | |
| 543 | GCTTGCGGTGATTAGTTTTC | MCRH1438_fwd | 801 |
| 544 | GATCAAATATCGCCAAGCATC | MCRH1438_rev | |
| 545 | CGCTTAACAATTGACTCACG | MCRH1440_fwd | 1216 |
| 546 | CAAAATTGGTCAAATTGACAC | MCRH1440_rev | |
| 547 | GGTTAATGCGACGGTTGTC | MCRH1475_fwd | 1875 |
| 548 | CGTTTACCTGCATTATCAGCAC | MCRH1475_rev | |
| 549 | CAAAGTAACCCAATGTAACTTTAAG | MCRH1486_fwd | 1011 |
| 550 | CAGCAGTATCTGTTTTCACGC | MCRH1486_rev | |
| 551 | GATAGCTTGCTTGAGTTTGATG | MCRH1493_fwd | 1053 |
| 552 | CGCATTGCTAAAGCTTACCTAC | MCRH1493_rev | |
| 553 | CCCTAACTTATTTTTATTTTCATCAC | MCRH1546_fwd | 900 |
| 554 | GTGGCAGTGCCAGTTCTTG | MCRH1546_rev | |
| 555 | CTAAGCCAGCATTTGATCG | MCRH1561_fwd | 1292 |
| 556 | GACAGAGCTGATGATGACTGC | MCRH1561_rev | |
| 557 | GGTTCTATAAACGATGATGATTTG | MCRH1565_fwd | 1074 |
| 558 | GCATATGGCTTTCATTTTGC | MCRH1565_rev | |
| 559 | CAAAAGCCTTGTCATCAAATTG | MCRH1568_fwd | 1487 |
| 560 | CAAGTCGCTTTTGGCGAC | MCRH1568_rev | |
| 561 | GATCACTTTTGCGGTATTATTG | MCRH1577_fwd | 1165 |
| 562 | GAATAAGGCTTTTGGGTAAGG | MCRH1577_rev | |
| 563 | GCCCAAAAAGAAATCATTAAG | MCRH1586_fwd | 1097 |
| 564 | GCTCTACCAACTGAGCTATTCC | MCRH1586_rev | |
| 565 | CCATATCTTTACGGGCATC | MCRH1671_fwd | 751 |
| 566 | CACATGCTTGGACAAAAGC | MCRH1671_rev | |
| 567 | CTGCTCAAGCTGGTGTGAC | MCRH1677_fwd | 1261 |
| 568 | GTCGTTGTTTTGCTACCAGTG | MCRH1677_rev | |
| 569 | GCCAGCCTAAAAACTAATGG | MCRH1696_fwd | 1113 |
| 570 | CAGTTGATTGCTGTGGTTTG | MCRH1696_rev | |
| 571 | CCATTGAAGAGATTGGCACAC | MCRH1701_fwd | 1051 |
| 572 | CTCATTGCTACAAGCAGCAAG | MCRH1701_rev | |
| 573 | GGTGTCTTTTTGACATAACTGTC | MCRH1705_fwd | 1324 |
| 574 | CATTAAATGGTGGGTAGGC | MCRH1705_rev | |
| 575 | GATACGCACAGGTTCAACG | MCRH1720_fwd | 987 |
| 576 | CACCAATGCAGCTTGCTAC | MCRH1720_rev | |
| 577 | GCAGATTATTCACAAATTGAGC | MCRH1732_fwd | 944 |
| 578 | CCCATAGCAAAGGAGAACC | MCRH1732_rev | |
| 579 | GAAATATGGCTTAGATAAAATTATAGC | MCRH1742_fwd | 798 |
| 580 | CTTGTTATCCACAAAACTGTATACC | MCRH1742_rev | |
| 581 | GTATCACAGGCTTGGCTTGG | MCRH1777_fwd | 1075 |
| 582 | CCCATATGAGTATCGGTGATGAG | MCRH1777_rev | |
| 583 | GGCAGATGAGGTGATTAATAAC | MCRH1841_fwd | 650 |
| 584 | CAAAAACCAGCTTGTGAGATAC | MCRH1841_rev | |
| 585 | CGAATTTTTGGGTGATTTG | MCRH1853_fwd | 1501 |
| 586 | GAACAAGAATTGGCACTCATC | MCRH1853_rev | |
| 587 | GCGCCTTGCCATGTATATC | MCRH1878_fwd | 792 |
| 588 | GGCATGAATATCATCAAAGC | MCRH1878_rev | |
| 589 | GATATCAATTCATCAAAATCCACC | MCRH1934_fwd | 1128 |
| 590 | CTCACCACGCACAATCTCAC | MCRH1934_rev | |
| 591 | GCATTTTTCAGCAGTTTTTG | MCRH2003_fwd | 1238 |
| 592 | GGGTCAATAAAGAGGTGATGC | MCRH2003_rev | |
| 593 | GATGATTCACAACTGGATGC | MCRH2082_fwd | 859 |
| 594 | GAAAACTGACGCTCTAATACACC | MCRH2082_rev | |
| 595 | GGCTTGATAATTGCAGAAATC | MCRH2139_fwd | 1107 |
| 596 | CAAGTGCAGATAAGGCATTG | MCRH2139_rev | |
| 597 | GCTCACTCATCTGAGCTATCG | MCRH2151_fwd | 1377 |
| 598 | GCAAAATCTTGTAAAGCCATC | MCRH2151_rev | |
| 599 | GATGAAATTTTGGCACTTGAG | MCRH2184_fwd | 1244 |
| 600 | GAAAATCAGCAGGAAATGACAC | MCRH2184_rev | |
| 601 | CCCTATTTTCCCCTATTTTGG | MCRH2216_fwd | 1420 |
| 602 | GACTGATGGATAATTTTCGTTG | MCRH2216_rev | |
| 603 | GCGTATGGATTTTTGAAGGTG | MCRH2239_fwd | 778 |
| 604 | CAGTCATTGAGTACTGCCAAATAG | MCRH2239_rev | |
| 605 | CATCTGTTTTGTACCTGCTTGAC | MCRH2257_fwd | 851 |
| 606 | CCAAATGATTTATCAATCACCAC | MCRH2257_rev | |
| 607 | CTCAGCTTTCTGAAGATTTGC | MCRH2276_fwd | 1494 |
| 608 | GATTTGATGAAATATTATTCAAGTGC | MCRH2276_rev | |
| 609 | GATGTCTCAAAATTCATATTATACGC | MCRH2384_fwd | 1265 |
| 610 | GATTAAACACCTGCACATGACAAG | MCRH2384_rev | |
| 611 | GAATTCTACTCCCCTCTCACC | MCRH2399_fwd | 666 |
| 612 | CTGAAGAGTTTGATCATGGCTC | MCRH2399_rev | |
| 613 | CTGTTGCTGGATTTTTGATG | MCRH2415_fwd | 1069 |
| 614 | CTAAGTTCGTCTTGAGCAATG | MCRH2415_rev | |
| 615 | CTTGACGAGCTTACATCAAGTAC | MCRH2484_fwd | 1260 |
| 616 | GCATAAGATTCTCCATAGCCAG | MCRH2484_rev | |
| 617 | GGTCATATCACACAAATTTTATCC | MCRH2496_fwd | 1372 |
| 618 | CCAATCAGTCCATAAATAAGATG | MCRH2496_rev | |
| 619 | CAGATATGAACCCAAGCAAGG | MCRH2506_fwd | 1050 |
| 620 | GYCAAGATTATTTGGCACTG | MCRH2506_rev | |
| 621 | CATGCTGTGCTAAATACCCC | MCRH2519_fwd | 1102 |
| 622 | CAGGTTTAATTTTGCCTGAAG | MCRH2519_rev | |
| 623 | GTATTATGGAAAACCGCCAAG | MCRH2553_fwd | 1074 |
| 624 | GACAAGTTGCACAGCTTTGAG | MCRH2553_rev | |
| 625 | GTGCTTAATATCGCCCAATC | MCRH2560_fwd | 969 |
| 626 | CAGCATACGCTGAAAAACTG | MCRH2560_rev | |
| 627 | GGTTTTTGGCATTTACAATAAAAC | MCRH2592_fwd | 1130 |
| 628 | GCCTTTGAATATTAAACACAAATACC | MCRH2592_rev | |
| 629 | CCTATTTATTTACATAAACGCATAG | MCRH2606_fwd | 1061 |
| 630 | CATGTTATCTGACTGACATTCG | MCRH2606_rev | |
| 631 | CATTCAGCTGTCTGATGGTG | MCRH2612_fwd | 1301 |
| 632 | CTTAAGCGTTGGCTTATTTTTG | MCRH2612_rev | |
| 633 | GCAGTACGCTGACTATTAAAGC | MCRH2625_fwd | 1065 |
| 634 | CTTTGGTAAACTCACCCAAAAC | MCRH2625_rev | |
| 635 | CTTGGTTCATCTACCCCATC | MCRH2627_fwd | 1386 |
| 636 | GCGGTTATTATTGAGAGCTTG | MCRH2627_rev | |
| 637 | GCATTGGGTGTGAGTCTATG | MCRH2641_fwd | 1427 |
| 638 | CATCAGCCATATCCGCC | MCRH2641_rev | |
| 639 | CATGTTATCAAAAATTGCATTAG | MCRH2669_fwd | 1133 |
| 640 | GCTATTAATTCCATGATCAGC | MCRH2669_rev | |
| 641 | CCACATTACCCGTCCAGG | MCRH2682_fwd | 843 |
| 642 | GTCATCGCCAAAAGACTGAC | MCRH2682_rev | |
| 643 | GATGACTTGATACCACAAAGATG | MCRH2754_fwd | 1263 |
| 644 | CAAAACTGGCGATTAATTCAG | MCRH2754_rev | |
| 645 | CCGCTTTAATGCTATTTATGG | MCRH2759_fwd | 1013 |
| 646 | GCTGACAGGCAAATCGTAC | MCRH2759_rev | |
| 647 | CGTTTATCACCTTTATCGGTATC | MCRH2783_fwd | 1405 |
| 648 | CCGGTTACAAAGATAAATTTCG | MCRH2783_rev | |
| 649 | CCTATACCGATGGCTCAGATC | MCRH2844_fwd | 1376 |
| 650 | CTTTGTTCAAAAACTGCAACC | MCRH2844_rev | |
| 651 | GAAAATCATCAAATATGCAACAC | MCRH2851_fwd | 992 |
| 652 | CTTGTAATTGGGTATGATTGAATG | MCRH2851_rev | |
| 653 | GCATCATCATCAAGCTTTCG | MCRH2861_fwd | 1057 |
| 654 | GATTGAATAAGTAAAATCCAACTCC | MCRH2861_rev | |
| 655 | CCATGCCTTTGATGAATTTG | MCRH2874_fwd | 1383 |
| 656 | CATGGTCATCTAAATCCACCAAC | MCRH2874_rev | |
| 657 | CAGAGTGGATGAAAAACTGG | MCRH2891_fwd | 1060 |
| 658 | GATTGGCATAACAAGACCTG | MCRH2891_rev | |
| 659 | CTAAAAGCCAAATGTGATGAAC | MCRH2904_fwd | 1194 |
| 660 | CGAAAAATTACCAGAATGTAAAG | MCRH2904_rev | |
| 661 | GGTCTCTCCTGTGAGTTTGG | MCRH2916_fwd | 800 |
| 662 | GTCATGCCAGCAGATGAG | MCRH2916_rev | |
| 663 | CAGTGATAACATACATAAAAGTTGC | MCRH2935_fwd | 1191 |
| 664 | GCATATTATGCCGATAAAATCTC | MCRH2935_rev | |
| 665 | CTAAAAATAAACGCCCAAAGAC | MCRH3006_fwd | 1389 |
| 666 | CAACTCAGATGTACTGTGCTTTC | MCRH3006_rev | |
| 667 | CAAGATCCGTTTGTTTATTCTG | MCRH3022_fwd | 960 |
| 668 | GATAAGATGCCTCATCAATAACC | MCRH3022_rev | |
| 669 | GAAGCCAATCTGCTATTTGG | MCRH3030_fwd | 1098 |
| 670 | GATACCACATCCTGAAATTTGG | MCRH3030_rev | |
| 671 | CTCGGTTTCAAGTTTTGCTG | MCRH3040_fwd | 1126 |
| 672 | CTTTATCATCAGCACCTTCACC | MCRH3040_rev | |
| 673 | CTGTACACCCAAGGCATTG | MCRH3120_fwd | 937 |
| 674 | GACACTCATCAGTCATTTACGC | MCRH3120_rev | |
| 675 | GTAAATTTGGTTTGGTGGATG | MCRH3128_fwd | 1068 |
| 676 | GCTGTGAGCCATTAACAGC | MCRH3128_rev | |
| 677 | GGTGCTCCTAGGATAAATGC | MCRH3146_fwd | 689 |
| 678 | GAACTGCATCGTCCTAGCTC | MCRH3146_rev | |
| 679 | CCATATTCTCCCAAAAATGC | MCRH3327_fwd | 895 |
| 680 | CCAAACTGCCTGATTGTAATG | MCRH3327_rev | |
| 681 | GCCGATGTATTAGGTTTGC | MCRH3328_fwd | 1199 |
| 682 | CTACYAAGGCACCATCTAGC | MCRH3328_rev | |
| 683 | GATGCCTGATTATCCTTTGTG | MCRH3363_fwd | 1116 |
| 684 | CTGATAAAAAGCGTTCAGTTTG | MCRH3363_rev | |
| 685 | CAAAGAGGTGGTGATTGGTG | MCRH3380_fwd | 1212 |
| 686 | GTTGCATAATTTTCCTTTCAATG | MCRH3380_rev | |
| 687 | CTGAATTTACAGTTAAAACGGC | MCRH3399_fwd | 1398 |
| 688 | CAAGAATTACGCTCAAGTGC | MCRH3399_rev | |
| 689 | CAGCCGTAGCCTCAAATAG | MCRH3401_fwd | 1075 |
| 690 | GCGATATCACTGCTTTGATTG | MCRH3401_rev | |
| 691 | CATATTTGACTACCGCTATTCG | MCRH3404_fwd | 868 |
| 692 | CTGCTTATTTTATCCATTTGACTG | MCRH3404_rev | |
| 693 | GCAATCAATGTTTGACGACG | MCRH3409_fwd | 1435 |
| 694 | GTGGCTCACCTTGTTCAATAG | MCRH3409_rev | |
| 695 | GGGTGAGTTTACCACCAATC | MCRH3501_fwd | 1086 |
| 696 | CAGCATCTGAGCTGTCTTTG | MCRH3501_rev | |
| 697 | GCTCAGCAAACCAAAATAAC | MCRH3534_fwd | 1199 |
| 698 | CCAAGGATTGGTCAAAGAAC | MCRH3534_rev | |
| 699 | CAGGTTTACCTGTGACAATGG | MCRH3547_fwd | 1071 |
| 700 | GATGGCTCAAAAACAAAAGC | MCRH3547_rev | |
| 701 | CACACCGCTTGGACAATATG | MCRH3567_fwd | 1196 |
| 702 | CAATTGGACTGACCGAATCAC | MCRH3567_rev | |
| 703 | CGACCAGCATTAGCAATCTG | MCRH3578_fwd | 1001 |
| 704 | GATTGACATTCGTGATGAATTTG | MCRH3578_rev | |
| 705 | CAATGAAACTGCCCTAAGAG | MCRH3622_fwd | 1073 |
| 706 | TGGTGATATTGAGGGTTTCC | MCRH3622_rev | |
| 707 | CATTATTATCACCAAGACAAAGATG | MCRH3635_fwd | 1519 |
| 708 | CCAACGATTATTATCATAAAAAGC | MCRH3635_rev | |
| 709 | CTTGTTGGCGTTGATTTATTC | MCRH3705_fwd | 1086 |
| 710 | CAGTGGTCATCGCAAGTAAC | MCRH3705_rev | |
| 711 | CAATAGGGCGTTTGTATGC | MCRH3709_fwd | 1534 |
| 712 | CTGACCCCAATCTTCAAAATAG | MCRH3709_rev | |
| 713 | GCTCGTGGTGAGACTAAAATG | MCRH3729_fwd | 1231 |
| 714 | CACATAATGCCAAACTTAAAGC | MCRH3729_rev | |
| 715 | GCTGTGAAAAGCAGTATTAAACC | MCRH3742_fwd | 1329 |
| 716 | CCATAACTTTAACACCGCCTAC | MCRH3742_rev | |
| 717 | GCTTTACTTTACGGCATTGG | MCRH3759_fwd | 915 |
| 718 | CCAATGGCATCTTGATTTG | MCRH3759_rev | |
| 719 | CGCTGAGAAATATGCTTATTATACC | MCRH3844_fwd | 974 |
| 720 | CCATTTGGGTATCGGCTTG | MCRH3844_rev | |
| 721 | CAAGAAAGTAGCGTTGATGAG | MCRH3884_fwd | 1058 |
| 722 | CAATCGCCTTAAAAGATGAC | MCRH3884_rev | |
| 723 | GTTGCCACGGTAAATTTGC | MCRH3895_fwd | 1146 |
| 724 | CTTGTGACCATATACCACAAACC | MCRH3895_rev | |
| 725 | CTGATATTTTTATCGCTGTCAATAC | MCRH3907_fwd | 1564 |
| 726 | GCTGCCCAGTGCTTCAAC | MCRH3907_rev | |
| 727 | GACGGGCGTATCTGCAG | MCRH3939_fwd | 836 |
| 728 | CTAGGCTTGATAACGCACTG | MCRH3939_rev | |
| 729 | CTGTGACATTTGGCTTTAGTG | MCRH3966_fwd | 1067 |
| 730 | CTATTGGCCTGCGTATAGC | MCRH3966_rev | |
| 731 | CAAAAGCATTGGACAAAGTC | MCRH3969_fwd | 1163 |
| 732 | GGCATTAAAATCACCACCTG | MCRH3969_rev | |
| 733 | GACTTATCCAACCCAAAATGAAG | MCRH3996_fwd | 1396 |
| 734 | CTTCGACCTGTGATAATGGC | MCRH3996_rev | |
| 735 | GTGATGATGAGCAAACAGACG | MCRH4056_fwd | 1029 |
| 736 | CAATCTGCTTGATACCTTTATCTTG | MCRH4056_rev | |
| 737 | GGACTGAGTCTGGTGAAGAAGC | MCRH4147_fwd | 689 |
| 738 | GACCTACCTCAATCACAAATCAAG | MCRH4147_rev | |
| 739 | GGTATCATTGGCAAAAATGG | MCRH4174_fwd | 1069 |
| 740 | GTAAAAACGCCCATTCAAAC | MCRH4174_rev | |
| 741 | CAGCACCTTTGGATAACATC | MCRH4206_fwd | 1163 |
| 742 | CAACTTGTTTTTGCATGGC | MCRH4206_rev | |
| 743 | CTGATGATAAGGCGGTGAG | MCRH4291_fwd | 1455 |
| 744 | CAATAATGAATGGCGTTTTG | MCRH4291_rev | |
| 745 | CGAAGCGTTGAAATTTATGG | MCRH4304_fwd | 1077 |
| 746 | GATATGGGTAATGTTTTTGACC | MCRH4304_rev | |
| 747 | CTCAAACTGTGCCAAGAATG | MCRH4322_fwd | 989 |
| 748 | CCGATAAATAATCCAAAAAATC | MCRH4322_rev | |
| 749 | CAAAGGTGAAATTGCGGATAC | MCRH4367_fwd | 1199 |
| 750 | GCTTAATCTGAGCGACATCC | MCRH4367_rev | |
| 751 | CAAAACCTGATAGAAGCCATTG | MCRH4378_fwd | 1213 |
| 752 | CTATGATGTAAGTTCGGATAAGTGC | MCRH4378_rev | |
| 753 | GTACGCCTTTTGCACTCAG | MCRH4392_fwd | 1079 |
| 754 | CGATAAAAGGTGCATTACCG | MCRH4392_rev | |
| 755 | GATTTTTAAAGCCCCATCG | MCRH4469_fwd | 1274 |
| 756 | CTAAGGGCAAAAACACAAGG | MCRH4469_rev | |
| 757 | CATCTCAGGCTGCCCTTAC | MCRH4491_fwd | 1089 |
| 758 | CTGTCATATTTGGCTTGTGC | MCRH4491_rev | |
| 759 | CTGGGTTCATCAGGTAAAGG | MCRH4496_fwd | 1291 |
| 760 | CAATTTCTTTGTTGCCATTG | MCRH4496_rev | |
| 761 | GGCCAATTTTCGTACGC | MCRH4526_fwd | 862 |
| 762 | GTTCAGCCCAACGGTTG | MCRH4526_rev | |
| 763 | GATCAGATTTATCCTCTTTTTACCTG | MCRH4552_fwd | 1136 |
| 764 | GTATTCCTTTATTCTACCGTTGTTTT | MCRH4552_rev | |
| 765 | GAGCTACAAGTCGGCGATAC | MCRH4568_fwd | 994 |
| 766 | CTGCTTGGCAATAAAACATTAC | MCRH4568_rev | |
| 767 | GAGGACATTACCCAAACGG | MCRH4629_fwd | 1291 |
| 768 | CTAAGTCCTTAGGTTGCATGG | MCRH4629_rev | |
| 769 | GCTGATGGCAGGTTTACCC | MCRH4641_fwd | 772 |
| 770 | CCACAAATATATCGCCCCG | MCRH4641_rev | |
| 771 | GGAGCTGGCAGGTAAATTC | MCRH4697_fwd | 1021 |
| 772 | GCAATAATAATGGCAGATAATG | MCRH4697_rev | |
| 773 | CATTATTTATGGACAAACAAAATG | MCRH4706_fwd | 1127 |
| 774 | GTTTGTGATGGACAAAATACGG | MCRH4706_rev | |
| 775 | CCGTCTATGATTGATATAATTTGTG | MCRH4712_fwd | 802 |
| 776 | GATAAGCATTATGGTCGCTATG | MCRH4712_rev | |
| 777 | GGTAAAGATTGGGGCGTG | MCRH4716_fwd | 863 |
| 778 | GCATTGTTATCCACCTCTTTTAC | MCRH4716_rev | |
| 779 | GGCATAGTCGCATCATTTAAG | MCRH4730_fwd | 1055 |
| 780 | GTTTATTGACGCTGGTTGG | MCRH4730_rev | |
| 781 | CCTAACAATAAGCAAAACTCTTG | MCRH4740_fwd | 1185 |
| 782 | GCAAAATAAAAGGCAAAAAC | MCRH4740_rev | |
| 783 | CCATCAGACTCACCATCTTC | MCRH4750_fwd | 828 |
| 784 | GGCATAAGCTTTTAGGCTTTC | MCRH4750_rev | |
| 785 | GTTAATGTCGGTATGCAGCTTG | MCRH4908_fwd | 1048 |
| 786 | GAAGTATCTTGGTGGTCAACG | MCRH4908_rev | |
| 787 | GGCGAATTAACCTTATCTGG | MCRH4917_fwd | 1082 |
| 788 | GTTAAATTATCATGATTGGCTTG | MCRH4917_rev | |
| 789 | GGGTAAAGGCACAAAAGACAC | MCRH4930_fwd | 1057 |
| 790 | GGCTTTGTACAACTGGCTACC | MCRH4930_rev | |
| 791 | CAAAACTTTTACCATACCAAGATG | MCRH4983_fwd | 1211 |
| 792 | CGCTCAAAATATGCTGTAACG | MCRH4983_rev | |
| 793 | GTTCACCCACTTGCTGACAT | MCRH5027_fwd | 1035 |
| 794 | CACATGCAGACCGCCAC | MCRH5027_rev | |
| 795 | GATATCAGCCATATTGATAAGCAC | MCRH5073_fwd | 1372 |
| 796 | GAGCGAGTRGACACACGATAATG | MCRH5073_rev | |
| 797 | CGATGGTATTTGGTATGAAGC | MCRH5107_fwd | 1361 |
| 798 | GTAAATCTCCCCACGATGAC | MCRH5107_rev | |
| 799 | GGGCAAATCTATGAATGAAGC | MCRH5149_fwd | 1110 |
| 800 | CAAAGCGATATTGCTCACC | MCRH5149_rev | |
| 801 | GTTAAAAATGATGATGGTTAGATTG | MCRH5176_fwd | 1076 |
| 802 | CTGATAAAATCCCTGGATGG | MCRH5176_rev | |
| 803 | GAAGCAGCTTGGAATAAACAG | MCRH5178_fwd | 1233 |
| 804 | GCCCTTGCAAAATTAGGAC | MCRH5178_rev | |
| 805 | GGCAATGTGCTTGACCC | MCRH5224_fwd | 1191 |
| 806 | CACCTGCTTCTCCACTTCTG | MCRH5224_rev | |
| 807 | CGAGATTTGTGGCAATTTAG | MCRH5239_fwd | 1293 |
| 808 | CGTGGTATCTTTGACATCATC | MCRH5239_rev | |
| 809 | CCAAAAATAATCGGTACGGTC | MCRH5260_fwd | 733 |
| 810 | CATGGTTATAAAACAACGGATG | MCRH5260_rev | |
| 811 | CAAGTACCCATCATCACAGG | MCRH5275_fwd | 1059 |
| 812 | CGTATTGGCAAGTAAAAAGC | MCRH5275_rev | |
| 813 | GCGATTGTTACCAAAACCTTAG | MCRH5294_fwd | 793 |
| 814 | CAAAATTAATATTAGCCCCTTTG | MCRH5294_rev | |
| 815 | CCAATGACTTTTGGGATATG | MCRH5308_fwd | 1166 |
| 816 | CATAAGTTCGTGTTTTGTGCTAG | MCRH5308_rev | |
| 817 | CTTTTGGTGTGGGTGTTGTG | MCRH5342_fwd | 1049 |
| 818 | GGCATCTATCGCTGGTAGTAG | MCRH5342_rev | |
| 819 | GTGCCAAGTCTATGTCATTGC | MCRH5355_fwd | 1131 |
| 820 | CCAGACTCAATCTGTTCACG | MCRH5355_rev | |
| 821 | CCAAAACGGTTGAAGAATG | MCRH5441_fwd | 1106 |
| 822 | GTTAAAACCCTCCATGAATGC | MCRH5441_rev | |
| 823 | GCAGCTCACTACGACCTTTC | MCRH5451_fwd | 663 |
| 824 | CTAACCTTTGTTCGGCAGTG | MCRH5451_rev | |
| 825 | GATAATGACGCTCAAACTGG | MCRH5471_fwd | 1087 |
| 826 | CTGGCGTATATTGACCAGAC | MCRH5471_rev | |
| 827 | GCACGCCAAGCATCTTATC | MCRH5547_fwd | 981 |
| 828 | CACACCGTCAGCATCTTC | MCRH5547_rev | |
| 829 | CCATACAGGAGTGCATTTTC | MCRH5559_fwd | 832 |
| 830 | CGAACTCTCTATTCCATTGTTC | MCRH5559_rev | |
| 831 | GTTTGCTCAGGCTCAAAATAATC | MCRH5574_fwd | 1496 |
| 832 | GGTCAATGATGATGGCATTTG | MCRH5574_rev | |
| 833 | GAACAACGGCTAAAACTTGC | MCRH5581_fwd | 1352 |
| 834 | CGCTTGCCAGCGTACC | MCRH5581_rev | |
| 835 | GATGGCGGTGTGTGTTTG | MCRH5639_fwd | 824 |
| 836 | CCTTTGAATTTGACCAGTACAG | MCRH5639_rev | |
| 837 | GTTGGGGCTTTGATGACAC | MCRH5640_fwd | 849 |
| 838 | CCCAAGCCTACTAAAAGCAG | MCRH5640_rev | |
| 839 | GGTTCATGATAAAATCAGGTAGG | MCRH5644_fwd | 843 |
| 840 | GCCCTGACATTCCGCTAC | MCRH5644_rev | |
| 841 | GAGTGATGATTTGCCTGATG | MCRH5729_fwd | 1108 |
| 842 | GTGCAGTCGTTAAAGATGACG | MCRH5729_rev | |
| 843 | GAACCCATATGGTCAGCTTC | MCRH5753_fwd | 779 |
| 844 | GCCATTAAACTTGCCAAAAC | MCRH5753_rev | |
| 845 | GTTGCTGCACTGCCTAAAG | MCRH5785_fwd | 1384 |
| 846 | GAGGTGCGATAAGACTGTCG | MCRH5785_rev | |
| 847 | GATAAGACCATCAAGTGCAGAG | MCRH5787_fwd | 667 |
| 848 | CTTAGTATGTTTGGCGAGACC | MCRH5787_rev | |
| 849 | CGGATATTGCTAATAACATCAAC | MCRH5838_fwd | 1130 |
| 850 | CGACCAAACGCTGATCG | MCRH5838_rev | |
| 851 | GTGATCGATTTTTGTCGTGAG | MCRH5853_fwd | 1288 |
| 852 | CTATTGCTTCGATGACTCGTTAC | MCRH5853_rev | |
| 853 | CGAATATGGCAAAAAGCTG | MCRH5872_fwd | 1459 |
| 854 | GCCGTTTCAATGATAGTTGC | MCRH5872_rev | |
| 855 | CATCAGCATACCCACAGTTG | MCRH5882_fwd | 1093 |
| 856 | GGCATTGCCCATAGTTTTAG | MCRH5882_rev | |

### EXAMPLES

### Example 1

### General Screening Procedure for the Identification of Antigenic Bacterial Proteins According to the Present Invention

[0357] The approach, which has been employed for the present invention, is based on the interaction of proteins or peptides encoded by Mcat with the antibodies present in human sera. The antibodies produced against Mcat by the human immune system and present in human sera are indicative of the in vivo expression of the antigenic proteins and their immunogenicity. In addition, the antigenic proteins, as identified by the bacterial surface display expression libraries using pools of pre-selected sera, are processed in a second and third round of screening by individual selected or generated sera. Thus the present invention supplies an efficient, relevant, comprehensive set of antigens as a pharmaceutical composition, especially a vaccine preventing infections caused by Mcat.

[0358] In the antigen identification program for identifying a comprehensive set of antigens according to the present invention, at least two different bacterial surface expression libraries from Mcat are screened with several serum pools or plasma fractions (antibody pools). The antibody pools are derived from a serum collection, which has been tested against antigenic compounds of Mcat, such as whole cell, total extracts. Sera determined to have high ELISA titre have to react with multiple proteins in immunoblotting in order to be considered relevant in the screening method applied for the present invention.

[0359] The expression libraries as used in the present invention should allow expression of all potential antigens, e.g. derived from all secreted and surface proteins of Mcat. Bacterial surface display libraries will be represented by a recombinant library of a bacterial host displaying a (total) set of expressed peptide sequences of Mcat on two selected outer membrane proteins (LamB and FhuA) at the bacterial host membrane (Georgiou, G., 1997; Etz, H. et al., 2001). One of the advantages of using recombinant expression libraries is that the identified serum-reactive antigens may be instantly produced by expression of the coding sequences of the screened and selected clones expressing the antigens without further recombinant DNA technology or cloning steps necessary.

[0360] The comprehensive set of antigens identified by the described program according to the present invention may be analysed further by one or more additional rounds of screening. Therefore individual antibody preparations or antibodies generated against selected peptides, which were identified as immunogenic can be used. According to a preferred embodiment the individual antibody preparations for the second round of screening are derived from healthy adults and/or challenged adults who show an antibody titre above a certain minimum level, for example an antibody titre being higher than 80 percentile, preferably higher than 90 percentile, especially higher than 95 percentile of the human (patient or healthy individual) sera tested. Using such high titre individual antibody preparations in the second screening round allows a very selective identification of the antigens and fragments thereof from Mcat.

[0361] Following the comprehensive screening procedure, the selected antigenic proteins, expressed as recombinant proteins, or—in case they can not be expressed in prokaryotic expression systems—in vitro translated products, or synthetically produced antigenic peptides can be tested in a second screening by a series of ELISA and Western blotting assays for the assessment of their immunogenicity with a large human serum collection (minimum ˜20 healthy and patients sera).

[0362] It is important that the individual antibody preparations (which may also be the selected serum) allow a selective identification of the most promising candidates of all the serum-reactive antigens from all the promising candidates from the first round. Therefore, preferably at least 10 individual antibody preparations (i.e. antibody preparations (e.g. sera) from at least 10 different individuals exposed to the chosen pathogen) should be used in identifying these antigens in the second screening round. Of course, it is possible to use also less than 10 individual preparations, however, selectivity of the step may not be optimal with a low number of individual antibody preparations. On the other hand, if a given antigen (or an antigenic fragment thereof) is recognized by at least 10 individual antibody preparations, preferably at least 30, especially at least 50 individual antibody preparations (in this case 22), identification of the antigen is also selective enough for a proper identification. Serum-reactivity may of course be tested with as many individual preparations as possible (e.g. with more than 100 or even with more than 1,000).

[0363] Therefore, the relevant portion of the antibody preparations according to the method of the present invention should preferably be at least 10, more preferably at least 30, especially at least 50 individual antibody preparations. Alternatively (or in combination) antigens may preferably be also identified with at least 20%, preferably at least 30%, especially at least 40% of all individual antibody preparations used in the second screening round.

[0364] According to a preferred embodiment of the present invention, the sera from which the individual antibody preparations for the second round of screening are prepared (or which are used as antibody preparations), are selected by their titre against Mcat (e.g. against a preparation of this pathogen, such as a lysate, cell wall components and recombinant proteins). Preferably, some are selected with high IgG titres, calculated from the OD reading at a given dilution when the whole organism (total lysate or whole cells) is used as antigen in the ELISA.

[0365] The recognition of linear epitopes recognized by serum antibodies can be based on sequences as short as 4-5 amino acids. Of course it does not necessarily mean that these short peptides are capable of inducing the given antibody in vivo. For that reason the defined epitopes, polypeptides and proteins are further to be tested in animals (mainly in mice) for their capacity to induce antibodies against the selected proteins in vivo.

[0366] The preferred antigens for extracellular bacteria are located on the cell surface or secreted, and are therefore accessible extracellularly. Antigens from bacteria with an intracellular stage in host cells may also be derived from intracellular locations, but need to be presented on the host cell as antigens. Antibodies against cell wall proteins are expected to serve multiple purposes: to inhibit adhesion, to interfere with nutrient acquisition, to inhibit immune evasion and to promote phagocytosis (Foxwell et al., 1998; Murphy 2005; Rao et al., 1999; Cripps and Otczyk 2006). Antibodies against secreted proteins are beneficial in neutralisation of their function as toxin or virulence component. It is also known that bacteria communicate with each other through secreted proteins. Neutralizing antibodies against these proteins will interrupt growth-promoting cross-talk between or within infection causing pathogen species. Bioinformatic analyses (signal sequences, cell wall localisation signals, and transmembrane domains) proved to be very useful in assessing cell surface localisation or secretion. The experimental approach includes the isolation of antibodies with the corresponding epitopes and proteins from human serum, and the generation of immune sera in mice against recombinant proteins selected on the basis of results from the bacterial surface display screens. These sera are then used in a third round of screening as reagents in at least one of the following assays: cell surface staining of Mcat grown under different conditions (FACS or microscopy), determination of neutralizing capacity (toxin, adherence), and promotion of opsonisation and serum bactericidal activity.

[0367] For that purpose, recombinant proteins made on the basis of results from screening of the E. coli libraries are injected into mice and immune sera are taken and tested in the relevant in vitro assay. Alternatively, specific antibodies may be purified from human or mouse sera using peptides or proteins as substrate.

[0368] According to the antigen identification method used herein, the present invention can surprisingly provide a set of comprehensive novel nucleic acids and novel proteins, antigens and fragments thereof of Mcat, among other things, as described herein. The nucleotide sequences according to the present invention encoding such antigens have preferably a nucleotide sequence which is individually set forth in SEQ ID NOs 1 to 214 (Table 4), whereby the corresponding encoded amino acid sequences have an amino acid sequence as set forth in SEQ ID NOs 215 to 428 (Table 4).

[0369] All linear fragments of a particular antigen may be identified by analysing the entire sequence of the protein antigen by a set of peptides overlapping by 1 amino acid with a length of at least 10 amino acids. Subsequently, non-linear epitopes can be identified by analysis of the antigen with sera using the expressed full-length protein or domain polypeptides thereof. Assuming that a distinct domain of a protein is sufficient to form the 3D structure independent from the native protein, the analysis of the respective recombinant or synthetically produced domain polypeptide with serum would allow the identification of conformational epitopes within the individual domains of multi-domain proteins. For those antigens where a domain possesses linear as well as conformational epitopes, competition experiments with peptides corresponding to the linear epitopes may be used to confirm the presence of conformational epitopes.

[0370] Subsequent sequencing of a larger number of randomly picked clones (approx. 600 clones per screen) led to the identification of the gene and the corresponding peptide or protein sequence that was specifically recognized by the human serum antibodies used for screening. The frequency with which a specific clone is selected reflects at least in part the abundance and/or affinity of the specific antibodies in the serum used for selection and recognizing the epitope presented by this clone. Table 4 summarizes the data obtained for the two performed screens.

[0371] It is further worth noticing that a large number of the genes identified by the bacterial surface display screen encode proteins of Mcat, which have no assigned function or may even constitute proteins, which have not been predicted by previous bioinformatic analysis. Thus, many of these candidates constitute novel antigenic proteins of Mcat.

### Example 2

### Characterization and Selection of Human Serum Samples Based on Anti-Mcat Antibodies and Preparation of Antibody Screening Reagents

### Experimental Procedures

### Human Serum Collection.

[0372] From 167 otitis media patients, middle ear fluid, sinus fluid and serum were obtained. Routine clinical examination and microbiology were used to establish clinical status and infection status with Mcat. Serum samples were also collected from 49 children with history of asthma but without history of otitis media for the last months, and a total of 13 serum samples were collected from children with no recent episode of acute otitis but with a history of recurrent otitis media. Finally, 85 serum samples were obtained from patients with respiratory allergies, and 54 serum samples were collected from healthy exposed individuals without oropharyngeal Mcat colonization, to serve as a reference for functional (protective) antibodies.

[0373] Serum samples were stored at −80° C. for long term storage, or at 4° C. with the addition of 0.05% sodium azide for short term storage for use in ELISA.

### Enzyme-Linked Immunosorbent Assay (ELISA).

[0374] Mcat strain RH4 was grown in BHI liquid medium at 37° C., 5% CO₂ until a late log phase was reached. Cells were harvested by centrifugation (1,000×g, 10 min, 4° C.) and washed twice with PBS. Bacteria were re-suspended in PBS containing protease inhibitors and then lysed on ice by sonication (2 min, pulse 5, 100% power). The supernatant was collected by centrifugation (1,000×g, 15 min, 4° C.). The protein concentration was determined by Bradford assay.

[0375] ELISA plates (Maxisorb, Millipore) were coated with 5-10 μg/ml total protein diluted in coating buffer (0.1 M sodium carbonate pH 9.2). Two dilutions of sera (10,000×, 50,000×) were made in 1% BSA, PBS. Highly specific Horseradish Peroxidase (HRP)-conjugated anti-human IgG secondary antibodies (Southern Biotech, U.S.A.) were used according to the manufacturer's recommendations (dilution: 1,000×). Antigen-antibody complexes were quantified by measuring the conversion of the substrate (ABTS) to colored product based on OD405 nm readings by automatic ELISA reader (TECAN SUNRISE, Austria).

### Immunoblotting.

[0376] Bacteria were solubilised by adding SDS-PAGE sample buffer containing SDS and 2-mercaptoethanol, and heat-denatured. Approximately 5 μg total proteins were separated by SDS-PAGE using the BioRad Mini-Protean 3 Cell electrophoresis system and proteins were transferred to nitrocellulose or PVDF membranes. After overnight blocking in 5% milk, human sera were added at between 1:1,000 and 1:5,000 dilution, and HRP labelled anti-human IgG was used for detection.

### Purification of Antibodies for Genomic Screening.

[0377] For purification of immunoglobulin (IgGs), human serum pools were heat-inactivated at 56° C. for 30 min and centrifuged to remove precipitated proteins. The supernatant was passed through a 0.2 lam filter. Antibodies against E. coli proteins were removed by incubating the heat-inactivated sera with whole cell E. coli cells (DH5alpha, transformed with pHIE11, grown under the same condition as used for bacterial surface display). E. coli cells in the logarithmic growth phase were collected by centrifugation from a 100 ml culture, washed twice with PBS and re-suspended in PBS to a final volume of approximately 100 μl. One ml serum and 100 μA of bacterial cell suspension are mixed and incubated for 6 to 15 hrs at 4° C. under continuous agitation (Rotator Drive STR4, Stuart Scientific). After centrifugation at 8,000 rpm at 4° C. for 10 min, the supernatant is transferred into a new tube and depletion repeated twice using the same volume of E. coli cell suspension. Finally, bacterial cells are removed by centrifugation and the serum filtered through a 0.22 μm Spin-x® filter (Costar, U.S.A.).

[0378] For IgG purification, samples were diluted 1:3 with Binding Buffer (Pierce, U.S.A.) and applied to equilibrated Ultralink Immobilized Protein G columns (Pierce, #53125). A volume of binding solution containing 1 ml serum was applied to 1 ml Protein G beads. After washing the column with 20 bed volumes of Binding Buffer, bound IgGs were recovered by elution with Elution Buffer (Pierce, U.S.A.). The eluted fractions were adjusted immediately to physiologic pH by adding 1/10 of the volume of Neutralization Buffer. Samples with the highest absorbance were pooled and dialyzed against PBS.

[0379] The efficiency of depletion and purification was checked by 12% SDS-PAGE and the protein concentration was determined by comparison to a BSA standard on the same SDS-PAGE analysis. Pooled IgG fractions were biotinylated according to the manufacturer's instructions (EZ-Link Sulfo-NHS-LC-Biotin, Pierce) and the biotinylation controlled by qualitative Western blot analysis.

### Results

[0380] Human sera, collected from otitis media patients, people suffering from respiratory allergies and healthy individuals, were analysed by ELISA on Moraxella catarrhalis (Mcat) lysate. The high titer sera were further analysed by Western blot (FIG. 1).

[0381] As expected with a complex Mcat lysate antigen, all the sera reacted with several bands from 250 to 10 kDa (FIG. 1). The reactivity of P4092 against Mcat antigens was particularly weak (FIG. 1). Two bands at approximately 90 kDa and 70 kDa were recognized by almost all sera (FIG. 1). In paired serum samples from the same patient, there was little if any difference between sera taken early and late in the course of otitis media (FIG. 1). Nevertheless, the convalescent serum from P4060 exhibited stronger reactivity to a band at approximately 70 kDa, and the convalescent serum from P4101 had reactivity with a doublet band at approximately 65 kDa, which was not present in the acute serum from this patient (FIG. 1). The low degree of differences between acute and convalescent sera could be due to otitis media being a multifactorial disease, with several viral as well as bacterial pathogens potentially being involved, which could reduce immune responses against Mcat.

[0382] The sera giving strong signals in Western blot analysis with Mcat antigen were selected to make serum pools to select bacterial display libraries (FIG. 1). In total, 4 different serum pools were generated based on the available clinical diagnosis: Pool IC20, sera IC58B, IC84B, IC85B, IC86B and IC89B (healthy individuals). Due to the limited serum volume, IC54A serum was used instead of IC84B serum for peptide ELISA. Pool P37, sera P3918, P3923, P3941, P3943 (children with asthma, age 5-17 years) and P3965 (a child with recurrent OM). Pool P36, sera P3792, P3801, P3819, P3832, P3861 (patients with respiratory allergies). Pool P39, individual sera P4060.2, P4070.2, P4072.2, P4101.2 and P4115.2 (patients recovering from otitis media). P4120 convalescent serum (P4120.2) was not part of the pool used for genomic peptide display library screening, but P4120 acute and convalescent serum pair was included in peptide ELISA due to the fact that Moraxella was isolated from this patient's clinical sample.

[0383] The serum pools were then preadsorbed on E. coli to remove anti-E. coli antibodies, including antibodies against the FhuA and LamB proteins used as scaffolds in the surface display libraries, and thereby reduce nonspecific binding in the subsequent MACS screening. Following preadsorption, human IgGs were purified, and biotinylated.

[0384] The IgG concentrations in each serum pool obtained after biotinylation were: Pool IC20, 0.38 mg/ml. Pool P36, 0.38 mg/ml. Pool P37, 0.21 mg/ml. Pool P39, 0.30 mg/ml.

[0385] These serum pools were used for MACS screening of the Mcat RH4 surface display libraries.

### Example 3

### Generation of Highly Random, Frame-Selected, Small-Fragment, Genomic DNA Libraries of Moraxella catarrhalis (Mcat)

### Experimental Procedures

[0386] Preparation of genomic DNA from Moraxella catarrhalis RH4. Genomic DNA from Mcat RH4 was prepared using standard protocols. Briefly, cells from a 50 ml culture in BHI medium (Brain heart infusion medium) were harvested by centrifugation and resuspended in 8 ml TE buffer. After addition of 1 ml 10% SDS and 0.5 ml proteinase K (20 mg/ml) the solution was incubated at 37° C. for 1 h, followed by repeated phenol/chloroform extractions (at least twice). Genomic DNA was precipitated by adding 1/10 volumes of 3 M sodium acetate (pH 5.3) and 2 volumes of absolute ethanol, transferred to 70% ethanol using a sterile loop and centrifuged. The pellet was dried, redissolved in 1 ml TE buffer containing 0.2 mg/ml RNaseA and incubated at 37° C. for 30 min to remove residual RNA. The DNA was ethanol precipitated again and finally dissolved in 0.5 to 1 ml Tris/HCl buffer (10 mM, pH 8.5).

[0387] Preparation of small genomic DNA fragments from Mcat RH4. Depending on the desired size different methods were used for the random fragmentation of genomic DNA. Fragments ranging in size between 150 and 300 bp were obtained by sonication of approx. 100 μg DNA in 5×50 μl Tris/HCl (10 mM, pH 8.5) using a cup-horn sonicator (Bandelin Sonoplus UV 2200 sonicator equipped with a BB5 cup horn, 10 sec. pulses at 100% power output). Fragments of 50 to 150 bp in size were obtained by mild DNase I treatment using Novagen's shotgun cleavage kit. According to the manufacturer's instructions, preliminary tests using different DNase I dilutions were performed and evaluated on a 2% TAE agarose gel. The determined optimum conditions were applied for cleavage of approx. 100 μg DNA. This treatment resulted in total fragmentation of genomic DNA into near 50-150 bp fragments.

[0388] Following fragmentation, the DNA was separated on 5% TBE polyacrylamide gels or 2% TAE agarose gels (after DNase cleavage only), the areas corresponding to DNA fragments of 50-150 bp and 150-300 bp, respectively, were cut out and the DNA isolated using the QiaExII kit (Qiagen, Hilden, Germany).

[0389] To remove overhanging ends, the isolated fragments were then incubated with T4 DNA polymerase in the presence of dNTPs (100 μM each), followed by phenol/chloroform extraction and ethanol precipitation. The fragments were used immediately in ligation reactions or frozen at −20° C. for subsequent use.

[0390] Description of the vectors. The vector pMAL4.31 was constructed on a pASK-IBA backbone (Skerra 1994) with the beta-lactamase (bla) gene exchanged with the Kanamycin resistance gene. In addition, the bla gene was cloned into the multiple cloning site. The sequence encoding mature beta-lactamase is preceded by the leader peptide sequence of ompA to allow efficient secretion across the cytoplasmic membrane. Furthermore a sequence encoding the first 12 amino acids (spacer sequence) of mature beta-lactamase follows the ompA leader peptide sequence to avoid fusion of sequences immediately after the leader peptidase cleavage site, since e.g. clusters of positive charged amino acids in this region would decrease or abolish translocation across the cytoplasmic membrane (Kajava et al., 2000). A SmaI restriction site serves for library insertion. An upstream FseI site and a downstream NotI site, which were used for recovery of the selected fragment, flank the SmaI site. The three restriction sites are inserted after the sequence encoding the 12 amino acid spacer sequence in such a way that transcription of the bla gene stops 15 bp after the NotI site. A 3n+1 bp insertion restores the bla ORF so that beta-lactamase protein is produced with a consequent gain of Ampicillin resistance.

[0391] The vector pMAL9.1 was constructed by cloning the lamB gene into the multiple cloning site of pEH1 (Etz, H. et al., 2001). Subsequently, a linker containing the restriction sites FseI, SmaI and NotI was inserted in lamB after the sequence coding for serine-155 by PCR mutagenesis. The reading frame for this insertion was constructed in such a way that transfer of frame-selected DNA fragments excised by digestion with FseI and NotI from plasmid pMAL4.31 yields a continuous reading frame of lamB and the respective insert.

[0392] The vector pHIE11 was constructed by cloning the fhuA gene into the multiple cloning site of pEH1 (Etz, H. et al., 2001). Subsequently a sequence was inserted in fhuA after the sequence coding for proline-405, containing the restriction site FseI, XbaI and NotI. Vector pHIE14 differs from pHIE11 by an additional sequence of 162 bp cloned into the XbaI site. As described above for pMAL9.1, cloning of a 3n+1 bp fragment into the FseI and NotI sites results in a continuous reading frame of fhuA and the respective insert.

[0393] Cloning and evaluation of the library for frame selection. Genomic DNA fragments from Mcat RH4 were ligated into the SmaI site of the vector pMAL4.31. Recombinant DNA was electroporated into DH10B electrocompetent E. coli cells (GIBCO BRL) and transformants plated on LB-agar supplemented with Kanamycin (50 μg/ml) and Ampicillin (50 μg/ml). Plates were incubated over night at 37° C. and colonies collected for large scale DNA extraction. A representative plate was stored and saved for collecting colonies for colony PCR analysis and large-scale sequencing. A simple colony PCR assay was used to initially determine the rough fragment size distribution as well as insertion efficiency. From sequencing data the precise fragment size was evaluated, junction intactness at the insertion site as well as the frame selection accuracy (3n+1 rule).

[0394] Cloning and evaluation of the library for bacterial surface display. Genomic DNA fragments were excised with the restriction enzymes FseI and NotI from the pMAL4.31 vector, containing the Moraxella catarrhalis RH4 library. The entire population of fragments was then transferred into plasmids pMAL9.1 (LamB) or pHIE11 (FhuA), which have been digested with FseI and NotI. Using these two restriction enzymes, which recognize an 8 bp GC rich sequence, the reading frame that was selected in the pMAL4.31 vector is maintained in each of the platform vectors. The plasmid library was then transformed into E. coli DH5alpha cells by electroporation. Cells were plated onto large LB-agar plates supplemented with 50 μg/mL Kanamycin and grown over night at 37° C. at a density yielding clearly visible single colonies. Cells were then scraped off the surface of these plates, washed with fresh LB medium and stored in aliquots for library screening at −80° C.

### Results

[0395] Genome Sequencing of Moraxella catarrhalis RH4

[0396] The evaluation of the constructed libraries as well as of the subsequent immuno-screening is facilitated considerably if the genome sequence of the Moraxella catarrhalis strain from which libraries are constructed is known.

[0397] Therefore, the genome of M. catarrhalis RH4 was done using second generation sequencing technology. Primary sequence acquisition on a Roche GS20/FLX system yielded 591,043 high quality sequence reads with an average reading length of 224 bp (132 Mb raw data). By de novo assembly 44 contigs were obtained. After comparison with the 41 contigs of the unfinished M. catarrhalis ATCC43617 genome, all gaps could be closed preliminary by PCR methods resulting in one contig of 1.9 Mb.

### Bacterial Surface Display Libraries

[0398] Ligation and subsequent transformation of approximately 1 μg of pMAL4.31 frame selection plasmid DNA and approximately 50 ng of fragmented and blunt-ended genomic Mcat RH4 DNA yielded 3.6×10⁵ to 1.2×10⁶ clones after frame selection. Based on the frame-selected DNA, two libraries (50/2 and 250) were generated in the pMAL9.1 (LamB) or pHIE11 (FhuA) display vectors, respectively. Frame-selected genomic DNA fragments were excised with FseI and NotI restriction digest, and approximately 5 ng fragments were ligated with 0.1 μg display plasmid DNA (pMAL9.1, LamB display scaffold, or pHIE11, FhuA display scaffold). Transformation into DH5alpha cells resulted in approximately 860,000 clones (50/2 library) and 913,500 clones (250 library). For each library, colonies were scraped off LB plates, pooled and frozen without further amplification.

[0399] To assess the size distributions and Mcat genome coverage of the libraries, randomly chosen library clones were sequenced (FIG. 2). The 50/2 and 250 libraries exhibited average insert sizes of 87 and 199 bp, respectively (FIG. 2). The 50/2 library comprised 860,000 colony-forming units, giving a calculated coverage of the Mcat genome of 40-fold. The 250 library comprised 913,500 colony-forming units, giving a calculated coverage of the Mcat genome of 98-fold.

[0400] For both libraries, the displayed inserts were distributed equally along the complete genome of Mcat RH4 (FIG. 2). I.e., both libraries provided a non-biased and highly redundant sampling of the complete Mcat RH4 genome.

### Example 4

### Identification of Highly Immunogenic Peptide Sequences from Moraxella catarrhalis (Mcat) Using Bacterial Surface Display Genomic Libraries and Human Sera

### Experimental Procedures

[0401] MACS screening. Approximately 1×10⁸ colony-forming units from a given library were grown in 5 mL LB-medium supplemented with 50 μg/mL Kanamycin at 37° C. for 50 min (FhuA library) and 30 min (LamB library), respectively. Expression was induced by the addition of 1 mM IPTG for 40 min (FhuA) and 2 h (LamB), respectively. Cells were washed twice with fresh LB medium and approximately 8×10⁶ cells re-suspended in 100 μL LB medium and transferred to an Eppendorf tube.

[0402] An amount of 20 μg of biotinylated, human IgGs was added to the cells and the suspension incubated overnight at 4° C. with gentle shaking. The cells were harvested, washed twice with 1 ml LB-Kan, and resuspended in 100 μl LB-Kan. An amount of 15 μl of streptavidin coupled microbeads (Miltenyi Biotec) were added and the mixture was incubated at 4° C. for 45 min. The MACS microbead cell suspension was washed once, resuspended in 1 ml LB-Kan and loaded onto pre-equilibrated MACS separation columns MS (Miltenyi Biotec) which was fixed to the magnet (the MS columns were equilibrated by washing with 3 ml 70% ethanol and 2×3 ml LB-Kan).

[0403] The columns were then washed three times with 3 ml LB-Kan, and elution was performed with 2 ml LB-Kan by removing the magnet. After washing the columns three times with LB-Kan, the eluate was reloaded, washed and eluted as before. Aliquots of the final eluate after three column binding/elution rounds were plated on LB-Kan agar plates and grown over night at 37° C.

[0404] Evaluation of selected clones by sequencing and Western blot analysis. Randomly selected clones were grown overnight at 37° C. in 200 μl LB medium supplemented with 50 μg/mL Kanamycin. Bacterial clones on LB/Kan agar were used for sequencing at Agowa (Germany).

[0405] For Western blot analysis, library E. coli clones were precultured in LB-Kan and induced with 1 mM IPTG for 2 h (FhuA) or 4 h (LamB). E. coli library clones which were shown by DNA sequence analysis not to display peptides, but did display the FhuA or LamB scaffold proteins as appropriate, served as negative controls in Western. Approximately 10 to 20 μg of total bacterial protein was separated by 10% SDS-PAGE and blotted onto PVDF membranes (Amersham Pharmacia Biotech, England). The reactivity of peptides displayed on the LamB or FhuA fusion proteins were detected using purified human IgG as the primary antibody at a dilution of approximately 1:3,000 to 1:5,000, and HRP-coupled goat anti-human IgG at a dilution of 1:50,000 as secondary antibody. Detection was performed using the Immobilon HRP substrate (Millipore, U.S.). Alternatively, rabbit anti-FhuA or rabbit anti-LamB polyclonal immune sera were used as primary antibodies in combination with HRP-coupled donkey anti-rabbit to verify expression of scaffold proteins for all clones.

### Peptide ELISA.

[0406] Biotin-labeled peptides (at the N-terminus) were resuspended in DMSO to ˜2 mg/ml concentration, divided into smaller aliquots and stored at −20° C. (for short term storage) or −80° C. (long term storage). Streptavidin-coated microtiter ELISA plates (Nunc, 436014) were washed three times with PBS containing 0.2% Tween-20 detergent (PBST). The peptides were diluted in PBS at concentration 5 μg/ml and used for coating the plates at 4° C. overnight. The streptavidin/peptide-coated plates were blocked with PBS supplemented with 2% BSA for 1 hr at RT and then washed with PBST three times. Sera were diluted 1:1,000 in PBS supplemented with 1% BSA and incubated with the peptides on the plates for 1 hr at room temperature. The bound antibodies were detected with highly specific Horseradish Peroxidase (HRP)-conjugated anti-human IgG secondary antibodies (Pierce, 31412) used at 1:2,000 dilution. Antigen-antibody complexes were quantified by measuring the conversion of the substrate ABTS (Sigma, A3219) to colored product based on OD405 nm readings by automatic ELISA reader (SynergyTM2, Biotek).

### Results

[0407] For surface display libraries representing the genome of the Mcat strain RH4, nine screens were performed, using two bacterial surface display libraries in LamB and FhuA and four human IgG pools (Table 1). It was observed that the IgG pools IC20 and P39 selected mainly antigens from the already well known immunodominant UspA2H and Hag antigens (Murphy 2005; Mawas et al., 2009; Tan et al., 2007a). Therefore, these IgG pools were preadsorbed with coli library clones displaying immunodominant UspA2H and Hag sequences (Table 1). Library screening with the adsorbed IC20 and P39 IgG pools had the intended effect of identifying less dominant Mcat antigens (Table 1). The IgG pools P36 and P37 did not show predominant selection of already known immunodominant antigens, and were therefore not adsorbed with bacterial library clones displaying immunodominant Mcat antigen fragments (Table 1).

[0408] For both libraries and in all 9 screenings, screening with biotinylated human IgG produced between 1.1 and 38-fold more binding clones (relative to input), than did screening without human IgG (Table 1, “specific enrichment”). Thus, the clones selected with the biotinylated human IgG were enriched for Mcat sequences recognized by IgG purified from the immune serum pools.

[0409] For each screen, approximately 800 clones were randomly selected and the sequences of the displayed Mcat peptides deduced by DNA sequencing. For Mcat ORFs that were selected more than three times per screen, library clones tested in Western blot analysis using the corresponding IgG pool as used for screening (Table 2). As expected based on the specific enrichment observed during screening (Table 1), a high percent and in most cases the majority of the selected clones were positive in Western blotting with human sera (Table 2).

[0410] Following DNA sequence and Western analysis, lead candidate antigens were selected, for which overlapping synthetic peptides were designed. The reactivity of human sera against the peptides was examined by ELISA (an example is given in Table 3).

[0411] Multiple peptides from individual antigens from Mcat RH4 were recognized by human sera (an example is given in Table 3). In paired serum samples from the same patient, there was evidence for seroconversion against peptides from MCRH1546 and MCRH1586. As mentioned for the Western blot analysis, the lack of difference between acute and convalescent sera for peptides derived from e.g. MCRH1565 (Table 3) could be due to otitis media being a multifactorial disease, with several viral as well as bacterial pathogens potentially being involved, which could reduce immune responses against Mcat.

[0412] The antigenic peptides recognized with the greatest seroconversion rates using the sera obtained from otitis media patients suggested that the antibodies targeting these epitopes played important role in overcoming the infection caused by this pathogen. On the other hand, the antigenic peptides that elicited high antibody titers in healthy population may have been important for overcoming the initial stages of infection (colonization).

[0413] Based on the combination of DNA sequence analysis, Western blotting and peptide ELISA, 214 antigens were identified from Moraxella catarrhalis strain RH4, that reacted with human sera (Table 4). The identified epitopes/proteins are immunogenic in humans, suggesting that they are expressed by the pathogen during infection and are capable of inducing a strong immune response (Table 4).

### Example 5

### Determination of the Conservation of the Immunogenic Mcat Proteins in Diverse Mcat Isolates

[0414] An ideal vaccine should be present in all, or the vast majority of strains of the target organism the vaccine is directed against. In order to examine the conservation of the open reading frames encoding the identified Mcat antigens, PCR was performed on 47 Mcat isolates (Table 5) with primers specific for the gene of interest. The conservation of all 214 identified Mcat antigens (Table 4) was thus tested.

### Experimental Procedures

### Isolation of Genomic DNA:

[0415] Moraxella spp. bacteria from a frozen stab were grown overnight at 37° C. on BHI agar. Next day, one well isolated colony was used to inoculate 7 ml BHI medium, followed by incubation with shaking at 37° C. for 18 h.

[0416] The 7 ml liquid cultures were harvested by centrifugation at 13,000×g for 2 min, the supernatant was removed by aspiration, and bacterial pellets lysed in 600 μl of Lysis Solution (Wizard Genomic Purification kit, Promega). Bacterial genomic DNA was purified according to the manufacturer's instructions (Wizard Genomic Purification kit, Promega).

[0417] The bacterial genomic DNA was dissolved in 60 μl of sterile bi-distilled water. The quality of the isolated genomic DNA was examined by 1% agarose gel electrophoresis and ethidium bromide (EtBr) staining, and the genomic DNA was stored at −80° C.

### PCR:

[0418] PCR was performed with primers specific for the genes of interest. DNA oligonucleotide primers were designed using the public domain program Primer3 (http://frodo.wi.mit.edu/cgi-bin/primer3/primer3_www_slow.cgi), or picked by hand. The fragment size was set to 1,000 bp, and regions identified as antigenic were incorporated in the amplified fragment. In cases where the ORF was smaller than 1,000 bp, the entire ORF was used for the analysis. The PCR primers are listed in Table 7.

[0419] PCR was performed in 25 μl reaction volumes, using Taq polymerase (1 U, Solis Biodyne, Estonia), 200 μM dNTPs (Fermentas, Germany), 2 mM MgCl₂ (Solis Biodyne, Estonia), 0.4 μMol of each oligonucleotide (MWG, Germany) and 10-20 ng of genomic DNA.

[0420] The cycling conditions were:

[0421] Heat denature 95° C., 5 min.

[0422] 30-35 cycles of (95° C. 30 s, anneal 30 s, 72° C. 1 min 20 s)

[0423] 72° C. 10 min

[0424] Soak 4° C.

[0425] The annealing temperature was adjusted for primers as required, but was generally 56° C. The PCR reactions were electrophoresed on 1.0% agarose TAE gels, together with 100 bp ladder (Invitrogen, 15628-050, 1 μg/ml). Gels were stained with EtBr and photographed on a standard UV table using an Olympus SP-500 UZ camera, appropriate filters, and AlphaEase FC software (v 5.0.1, Alpha Innotech Corporation).

[0426] To avoid false-positive results, negative control PCR reactions with water as template were included in all runs.

[0427] To avoid false-negative results, the library isolate RH4 was included in all PCR runs, to serve as positive control. In addition, all PCR reactions negative in the first amplification round were repeated in a second round, generally under the same conditions. In some cases, a third round was done applying changed cycling conditions and a proofreading thermostable DNA polymerase.

[0428] For each ORF, the number of isolates, where the ORF could be detected by PCR was first determined, based on the PCR analysis strategy described above. This number was termed “N”. The level of conservation can be calculated for each ORF as: N/47. N is stated in Table 6.

### Results

[0429] An example of the PCR analysis is given in FIG. 3A. The antigenic open reading frame MCRH3709 was conserved in 47 out of 47 examined Mcat isolates (FIG. 3A and Table 6). The antigenic open reading frame MCRH3844 was conserved in 26 out of 47 examined Mcat isolates (FIG. 3A and Table 6).

[0430] For the 214 ORFs encoding antigenic Mcat proteins (Table 4), it was found that the majority of ORFs were conserved amongst a set of 47 reference Mcat isolates comprising worldwide geographical locations (Table 5, Table 6 and FIG. 3). For example, 138 antigenic ORFs were conserved in all 47 Mcat isolates (Table 6 and FIG. 3B), and the majority or 92% of the 214 examined ORFs were conserved in more than 90% of the 47 examined Mcat isolates (FIG. 3C).

[0431] Thus, the identified antigenic Mcat proteins (Table 4) were generally highly conserved (Table 6 and FIG. 3), supporting their use as vaccine antigen.

### Example 6

### Testing Protectivity of M. catarrhalis Candidate Antigen-Induced Immune Response Against M. catarrhalis Infection

### Study Rationale:

[0432] Although M. catarrhalis is a human pathogen, several animal models have been developed in order to study protective potential of candidate antigens against M. catarrhalis infection and colonization. Pulmonary clearance models involve the direct inoculation or aerosolization of bacteria into the nasal cavity or lungs of experimental animals, including rats and mice. The rate at which the bacteria are cleared from the respiratory tract (nasal cavity, broncho-alveolar space and lungs) is measured following pulmonary challenge by live bacteria. Pulmonary clearance models are being used to evaluate potential vaccine antigens of both H. influenzae and M. catarrhalis (Murphy T F, 2005). Groups of animals are immunized with a putative vaccine antigen and an appropriate adjuvant. The enhancement of clearance by immunization with a putative vaccine antigen compared with controls is interpreted as a positive result, suggesting that the antigen may have a protective effect. The observation that an antigen induces enhanced pulmonary clearance in such animal model represents a line of evidence that the antigen may induce protection in humans.

[0433] The protective potential of M. catarrhalis protein antigens was studied in two mouse pulmonary clearance models performed independently by two different research groups. According to the Model #1 mice are immunized by intraperitoneal immunization using incomplete Freund's adjuvant (IFA), bacterial challenge is performed by introducing bacteria (M. catarrhalis strain RH4, 1×10⁶) directly into trachea and the bacterial colony forming units (CFU) are determined in lungs and bronchoalveolar lavage 6 hr after the challenge. Model #2 is performed using the same bacterial strain but a different mouse strain; mice are immunized by mucosal immunization in the presence of Intercell's IC31® adjuvant and bacterial challenge is performed by intranasal inoculation using the a similar CFU load (5×10⁶). The bacterial CFU are measured 12 hr after challenge in lungs and nasopharyngeal lavage. The highly conserved M. catarrhalis proteins that were selected during the library screening using human sera were expressed and purified as recombinant proteins and used for immunization of mice, in order to induce a hyperimmune response and evaluate the rate of bacterial clearance following the challenge.

### Experimental Procedures

[0434] Cloning and Expression of Recombinant M. catarrhalis Proteins

[0435] Cloning of genes/DNA fragments: The gene/DNA fragment of interest was amplified from genomic DNA of M. catarrhalis strain RH4 by PCR using gene specific primers. Apart from the gene specific part, the primers had restriction sites that aided in a directional cloning of the amplified PCR product. The gene annealing (specific) part of the primer ranged between 15-30 bases in length. The PCR products obtained were digested with the appropriate restriction enzymes and cloned into the pET28b (+) vector (Novagen) for His-tagged proteins. The constructs are listed in Table 8. Once the recombinant plasmid was confirmed to contain the gene of interest, E. coli BL21-CodonPlus (DE3)-RIPL cells (Stratagene) that served as expression host were transformed.

TABLE 8
List of genes selected for expression.

| | | | | | | SEQ ID | SEQ ID |
|---|---|---|---|---|---|---|---|
| Nr. of | Name of | | | DNA | Protein | NO | NO |
| construct | construct | Vector | RE | (start/stop) | (start/stop) | (DNA) | (protein) |
| 1 | MCRH0357-1 | pET28b(+) | NcoI/XhoI | 106-1455 | 36-485 | 860 | 887 |
| 2 | MCRH0391-1 | pET28b(+) | NcoI/XhoI | 58-570 | 20-190 | 861 | 888 |
| 3 | MCRH0546-1 | pET28b(+) | NcoI-BspHI/XhoI | 118-834 | 40-278 | 862 | 889 |
| 4 | MCRH0759-1 | pET28b(+) | NcoI/XhoI | 61-480 | 21-160 | 863 | 890 |
| 5 | MCRH0759-2 | pET28b(+) | NcoI/XhoI | 460-2739 | 154-913 | 864 | 891 |
| 6 | MCRH1493-1 | pET28b(+) | NcoI/NotI | 112-705 | 38-235 | 865 | 892 |
| 7 | MCRH1546-1 | pET28b(+) | NcoI/XhoI | 58-333 | 20-111 | 866 | 893 |
| 8 | MCRH1701-1 | pET28b(+) | NcoI/XhoI | 58-786 | 20-262* | 867, 868 | 894, 895 |
| 9 | MCRH2506-1 | pET28b(+) | NcoI/XhoI | 61-456 | 21-152 | 869 | 896 |
| 10 | MCRH2669-1 | pET28b(+) | NcoI/NotI | 88-723 | 30-241 | 870 | 897 |
| 11 | MCRH2844-1 | pET28b(+) | NcoI/XhoI | 70-2037 | 24-679 | 871 | 898 |
| 12 | MCRH3040-1 | pET28b(+) | NcoI/XhoI | 91-1815 | 31-605 | 872 | 899 |
| 13 | MCRH3040-2 | pET28b(+) | NcoI/XhoI | 1693-2757 | 565-919 | 873 | 900 |
| 14 | MCRH3709-1 | pET28b(+) | NcoI-AflIII/XhoI | 79-1158 | 27-386 | 874 | 901 |
| 15 | MCRH3729-1 | pET28b(+) | NcoI/XhoI | 88-1125 | 30-375 | 875 | 902 |
| 16 | MCRH3759-1 | pET28b(+) | NcoI/XhoI | 79-444 | 27-148 | 876 | 903 |
| 17 | MCRH3966-1 | pET28b(+) | NcoI/XhoI | 58-1410 | 20-470 | 877 | 904 |
| 18 | MCRH4526-1 | pET28b(+) | NcoI/XhoI | 139-576 | 47-192 | 878 | 905 |
| 19 | MCRH4526-2 | pET28b(+) | NcoI-BspHI/XhoI | 544-2883 | 182-961 | 879 | 906 |
| 20 | MCRH4706-1 | pET28b(+) | NcoI-AflIII/XhoI | 130-1536 | 44-512 | 880 | 907 |
| 21 | MCRH4712-1 | pET28b(+) | NcoI/XhoI | 91-315 | 31-105 | 881 | 908 |
| 22 | MCRH4730-1 | pET28b(+) | NcoI/XhoI | 82-1674 | 28-558 | 882 | 909 |
| 23 | MCRH4740-1 | pET28b(+) | NcoI-BspHI/XhoI | 76-909 | 26-303 | 883 | 910 |
| 24 | MCRH5107-1 | pET28b(+) | NcoI/XhoI | 109-765 | 37-255 | 884 | 911 |
| 25 | MCRH5471-1 | pET28b(+) | NcoI/XhoI | 166-909 | 56-303 | 885 | 912 |
| 26 | MCRH5471-2 | pET28b(+) | NcoI-BspHI/XhoI | 877-2358 | 293-786 | 886 | 913 |

The nomenclature of the genes is derived from the project-internal naming of the genome of M. catarrhalis strain RH4 (unpublished data). For a comprehensive study on the recently published genome, supplemented with a revised genomic annotation, please see de Vries S. P., et al., 2010 and the corresponding GenBank accession CP002005.1 (gi: 295919923). Notably the published genomic sequence was fully reversed, then several places repositioned and corrected, thus generally improved.
The restriction sites (RE) used for cloning and the position (start/stop) of the amplicons are indicated for each construct.
*The residue Threonine at position 261 relative to the native protein (“wild-type” fragment DNA/protein: SEQ ID NOs 867, 894) was changed to a Proline according to the sequence confirmation of the expression construct (“mutated” fragment DNA/protein: SEQ ID NOs 868, 895). Mutation could be due to PCR amplification or be a mutation in the particular RH4 strain used for PCR amplification.

### Expression and Purification of Proteins:

[0436] E. coli BL21-CodonPlus (DE3)-RIPL cells harboring the recombinant plasmid were grown into log phase in the required culture volume. Once an OD₆₀₀ₙₘ of 0.6 was reached the culture was induced with 0.1 mM IPTG for 3 hours at 37° C. The cells were harvested by centrifugation, lysed by a combination of the freeze-thaw method followed by disruption of cells with High pressure Homogenizer Panda 2K, (Niro Soavi). The lysate was separated by centrifugation into soluble (supernatant) and insoluble (pellet) fractions. Depending on the location of the protein different purification strategies were applied. A) If the His-tagged protein was in the soluble fraction, protein purification was done by binding the supernatant to Ni-Sepharose beads (Ni-Sepharose™ 6 Fast Flow, GE Healthcare). Due to the presence of the hexa Histidine (6×HIS) at the C-terminus or N-terminus of the expressed protein, it bound to the Ni-Sepharose while the other contaminating proteins were washed from the column by wash buffer. The protein was eluted by 250 mM Imidazole in 50 mM Tris, 150 mM NaCl buffer at pH 8.0. The eluate was dialyzed against 50 mM Tris, 150 mM NaCl buffer at pH 8.0 and concentrated if necessary. The protein concentration was assayed by Bradford or BCA and the protein quality and integrity was checked by SDS-PAGE and Western blot.

[0437] B) If the protein was present in the insoluble fraction, the pellet was washed several times to purify inclusion bodies. Inclusion bodies were solubilized in suitable buffer containing 8 M Urea and applied onto the Ni-NTA column under denaturing conditions (in buffer containing 8 M Urea) using the same materials and procedure as mentioned above. Contaminating proteins were washed from the column under denaturing conditions. Refolding of the His-tagged protein was performed while the protein was immobilized on the Ni-NTA matrix using buffer without urea. After renaturation, proteins were eluted by the addition of 250 mM Imidazole. The eluate was dialyzed to remove traces of urea and concentrated if the volume was large, checked by SDS-PAGE and measured by the Bradford or BCA method. Alternative, dilution refolding of the His-tagged protein was performed after the protein was eluted under denaturing conditions from the Ni-Sepharose beads by diluting the protein in an appropriate buffer without urea but containing e.g. surfactants. After renaturation, proteins were concentrated checked by SDS-PAGE and protein concentration measured.

### Mouse Pulmonary Clearance Study Employing Systemic Immunization:

[0438] Male BALB/c mice were used for studies (5 mice per each experimental group). Proteins were emulsified in a 1:1 ratio with Incomplete Freund's adjuvant. Killed bacteria (WKC) were used as a positive control, whereas the negative control was the adjuvant vehicle injected alone. Both control groups were formulated and delivered in the same manner as the tested antigens. OmpCD protein, a Moraxella catarrhalis outer membrane protein which increased bacterial clearance in published studies (Tymothy et al., 1998; Becker et al., 2007), was tested in parallel for the sake of comparison to our candidate antigens. Three immunizations were delivered at weekly intervals (days 0, 7 and 14), with the following protocol timelines:

### On Days 0, 7 and 14:

[0439] the mice received an intraperitoneal injection (i.p.) of 50 μg of protein emulsified in Incomplete Freund's adjuvant.

### On Day 21:

[0440] 0 h Bacterial challenge:
[0441] live bolus challenge with live Moraxella catarrhalis strain RH4. Bacterial strains and growth conditions:

[0442] Moraxella catarrhalis strain RH4 was isolated from the blood of an infected patient (provided by Arne Forsgren, Malmö University Hospital, Sweden). Bacteria were grown on horse blood agar at 37° C./5% CO₂ or in brain heart infusion (BHI, Becton Dickinson and Company) liquid medium at 37° C. with shaking. Bacteria were grown overnight on chocolate agar, harvested and washed three times in PBS. The concentration was assessed by measurement of optical density at 405 nm and adjusted to a challenge dosage of 10⁶ CFU in 20 μl [5×10⁷ CFU/ml]. Mice were sedated by intravenous (tail vein) injection of 0.12-0.15 ml (20 mg alphadone in PBS/kg body weight). The trachea was visualised through the oral cavity, a 22.5 G catheter is inserted and a 20 μl volume of PBS containing the live bacteria is introduced into the lungs with two 0.3 ml volumes of air.

### 0-6 h Observations on Clinical Status of Mice

### 6 h Autopsy and Collection of Tissues for Bacteria and White Cell Counts in the Lung:

[0443] at 6 h post-challenge, mice were euthanized by anesthetic overdose. Blood was collected by heart puncture, allowed to clot and serum collected following centrifugation at 4° C., 450×g, 10 mins. Serum is stored at −80° C.
[0444] the lungs were lavaged with 0.5 ml PBS (Bronchoalveolar lavage—BAL). Following lavage, the lungs were excised, connective tissue and heart are removed, placed in PBS and homogenised. BAL and lung homogenate were assessed for bacterial counts by plating, on chocolate agar plates, duplicate 20 μl volumes of a 10-fold series titration. Colonies were counted next day and calculated.

### Results:

[0445] Several vaccine antigen candidates have induced immune response which provided significantly faster clearance of the bacteria compared to IFA (adjuvant vehicle) control (FIG. 4).

[0446] The percentage of the bacteria (colony forming units, CFU) recovered in bronchoalveolar lavage calculated in reference to adjuvant control in phosphate based saline (IFA) is shown in (FIG. 4A). The median % value of the bacteria recovered after challenge from the animals immunized with killed whole cells (WKC) was 10%, whereas OmpCD protein did not show any increase in clearance compared to adjuvant control (IFA); therefore the bacterial CFU recovered was 100% of the IFA control group. Candidate antigens that provided ≧80% reduction in bacterial load in bronchoalveolar lavage (between 20% and 40% CFU were recovered compared to adjuvant control and OmpCD) were: MCRH5107-1 and MCRH4712-1. Therefore, these two antigens were almost as efficient as the whole killed cells positive control. Antigens that induced between 40% and 60% bacterial CFU reduction were MCRH0357-1, MCRH0759-1, and MCRH4730-1, whereas antigen MCRH2844-1 provided only 25% CFU reduction compared to adjuvant control in this study model. Antigen MCRH4526-1 provided 40% reduction in bacterial CFU recovered from BAL, compared to adjuvant control.

[0447] FIG. 4B shows the bacterial recovery from the lung tissue collected from the mice 6 h after challenge with M. catarrhalis RH4. In the lung homogenates from the animals immunized with whole killed cells, the bacterial recovery was 40% of the median CFU recovered from lungs of adjuvant (IFA) immunized mice, and in the animals immunized with the protein OmpCD there was no reduction in bacterial recovery compared to adjuvant control. The animals immunized with several M. catarrhalis candidate antigens had between 50% and 60% of bacteria recovered from the lung tissue compared to adjuvant control; these antigens were: MCRH0391-1, MCRH1493-1 and MCRH5107-1.

[0448] FIG. 4C shows a total % of recovered bacteria compared to adjuvant control group (IFA) when the results from both FIG. 4A (recovery in bronchoalveolar lavage) and FIG. 4B (recovery from lung tissue homogenate) were combined. Several Moraxella antigens still show a faster clearance of the bacteria compared to negative (IFA) control. MCRH5107-1 antigen provided overall 55% reduction in bacterial load, since bacteria recovered from both lungs and BAL represented only 45% of the median bacterial CFU recovered from the animals immunized with adjuvant control (IFA). Additional antigens that provided ˜40% faster bacterial clearance were: MCRH0357-1, MCRH0391-1 and MCRH1493-1.

[0449] Therefore, the described in vivo studies support the further use of selected antigens for testing and development of the vaccine against otitis media.

### Mouse Pulmonary Clearance Study Employing Mucosal Immunization:

### Bacterial Strains and Growth Conditions

[0450] Moraxella catarrhalis strain RH4 was isolated from the blood of an infected patient and obtained from Arne Forsgren (Malmö University Hospital, Sweden). Bacteria were grown on horse blood agar at 37° C./5% CO₂ or in brain heart infusion (BHI, Becton Dickinson and Company) liquid medium at 37° C. with shaking.

### Mice

[0451] Five- to seven-week-old female C57/BL6 bom (wt) mice were kept under specific, pathogen-free conditions. The animals were housed five per cage in a standardized 12 h light/dark cycle and received commercial food and water ad libitum. All the experiments were conducted in conformity with the European Communities Council Directive 86/609/EEC and the Swedish animal protection legislation.

### Intranasal Immunization and Blood Sampling of Mice

[0452] On day 0, before immunization, 10 μl blood samples from the tail were taken, for preparation of a pre-immunization serum pool.

[0453] On days 0, 21 and 42, groups of 10 mice were immunized intranasally with 20 (10 μl to each nostril) of antigen formulated in Intercell's adjuvant IC31®. Since the immunogenicity of the antigens was not known at the beginning of this study, maximum available antigen dose was used for immunization whenever possible, depending on the protein availability (Table 9).

[0454] Adjuvantation was done according to a detailed protocol supplied by Intercell AG. Briefly, 17.5 μl protein solution was mixed with 2.5 μl IC31® (2000 nmol/ml of KLK(L)₅KLK and 80 nmol/ml of Oligo(dIdC)₁₃), and incubated 30 min at room temperature. The adjuvanted protein was used to immunize mice within 1 hour of preparation. PBS control mice received PBS alone. Adjuvant control mice received 17.5 μA 50 mM Tris/HCl pH8 mixed with 2.5 μl IC31®.

[0455] For the intranasal immunization the mice were anaesthetized by light inhalation of isoflurane (Forene; Abbott) (4% isoflurane, flow 500-700 ml/min).

### Mouse Challenge

[0456] Mice were anaesthetized by light inhalation of isoflurane (Forene; Abbott) (4% isoflurane, flow 500-700 ml/min) and subsequently inoculated intranasally with 40 μl (20 μl to each nostril) live M. catarrhalis strain RH4˜5×10⁶ cfu.

[0457] For mouse inoculation, RH4 was grown in BHI medium to an OD₆₂₀ₙₘ of 0.4. Bacteria were pelleted, and resuspended in PBS. Mice were held in a head-up vertical position during the inoculation and kept in that position for at least 10 seconds after the inoculation.

### Euthanasia, Tissue Collection and Bacterial Culture

[0458] Mice were killed at 6 hours post-infection using an overdose of isoflurane and neck dislocation. Blood samples to quantitate the antibody response following the intranasal immunizations of mice with the purified recombinant proteins were obtained from each mouse and put on ice to clot. After centrifugation individual serum samples were frozen at −20° C.

[0459] Tracheal-nasopharyngeal lavage samples were obtained by inserting a needle in the trachea pointing cranially, and flushing with PBS, collecting the first 100 μl of liquid coming out of the nares.

[0460] Both lungs were removed, placed in 1 ml PBS plus protease inhibitor (Roche), homogenized using cell strainers (100 μm, Becton Dickinson and Company) and used for serial plating to quantify viable bacteria.

[0461] The experiments were repeated at least over two independent replicates. Data on the number of colony-forming units (cfu) in the nasopharynx and lungs of the mice were corrected for the infectious dose to 5×10⁶ cfu bacteria and analyzed with nonparametric Kruskal-Wallis tests and Dunn's posttesting.

TABLE 9
List of antigens and the immunization dose.

| | | | Dose/ | |
|---|---|---|---|---|
| | | Conc. | mouse | |
| Group | Antigen | [μg/ml] | [μg] | Batch number |
| 1^{st} antigen* | MCRH2506-1 | 2.97 | 51.97 | CS718/151841 |
| 2^{nd} antigen* | MCRH2844-1 | 5.9 | 103.25 | JF672/143356 |
| 3^{rd} antigen* | MCRH0759-1 | 2.33 | 40.77 | JF672/143335 |
| 4^{th} antigen* | MCRH3709-1 | 1.03 | 18.03 | CS718/151869 |
| 5^{th} antigen* | MCRH0357-1 | 0.94 | 16.45 | CS718/151980 |
| 6^{th} antigen* | MCRH3729-1 | 6.46 | 113.05 | MS708/145598d |
| 7^{th} antigen* | MCRH3759-1 | 1.68 | 29.40 | CS718/151880b |
| 8^{th} antigen* | MCRH4730-1 | 5.43 | 95.03 | JF672/143337b |
| positive control* | OmpCD | 2.50 | 43.75 | CS718/151880a |
| negative control, | | | | |
| IC31 ® alone^{x} | | | | |
| negative control, | | | | |
| PBS alone | | | | |

*17.5 μl antigen plus 2.5 μl IC31 ® adjuvant
^{x}17.5 μl buffer (50 mM Tris/HCl pH 8) plus 2.5 μl IC31 ® adjuvant

### Results

### Enhancement of Pulmonary Clearance

[0462] All groups of mice immunized with recombinant proteins showed a greater clearance of bacteria from lungs compared to the positive control protein OmpCD (FIG. 5). The effect was significant for MCRH2506-1 with one log reduced bacterial recovery compared to the mice immunized with adjuvants alone (IC31®) (p<0.01). There was also a significant reduction for MCRH2844-1 (p<0.05) and MCRH0759-1 (p<0.05) compared to IC31® alone, if sterile lung cultures were removed from the analysis. Based on the observation that sterile lung cultures appeared randomly in the PBS group, they were likely a technical artifact rather than biology involved in elimination of bacteria, hence introducing variability of intranasal inoculation. The number of sterile cultures detected per each group are indicated in Table 10.

[0463] Immunization with recombinant proteins showed a reduced bacterial load in the nasopharyngeal lavage for the candidates MCRH2506-1, MCRH0759-1, MCRH3759-1 and MCRH4730-1. The reduction compared to the IC31® control group was, however, not statistically significant for the analysis with or without sterile NAL cultures (FIG. 6). Nevertheless, since the same antigens which provided faster clearance in both broncho-alveolar lavage in the Model #1, MCRH3759-1 and MCRH4730-1, showed also effects in the naso-pharyngeal lavage in this study, the observed effects are considered worth further investigation.

TABLE 10
Summary of sterile cultures identified per each experimental group.

| | | | Total instances | Total instances |
|---|---|---|---|---|
| | | Number of | of sterile lung | of sterile NAL |
| | | mice/ | cultures | cultures |
| Group | Antigen | experiments | (sterile/tested) | (sterile/tested) |
| 1^{st} antigen* | MCRH2506-1 | 30/3 | 7/30 | 7/29 |
| 2^{nd} antigen* | MCRH2844-1 | 20/2 | 0/20 | 3/18 |
| 3^{rd} antigen* | MCRH0759-1 | 30/3 | 5/30 | 10/30 |
| 4^{th} antigen* | MCRH3709-1 | 20/2 | 1/20 | 8/19 |
| 5^{th} antigen* | MCRH0357-1 | 20/2 | 4/20 | 4/17 |
| 6^{th} antigen* | MCRH3729-1 | 20/2 | 5/20 | 3/20 |
| 7^{th} antigen* | MCRH3759-1 | 30/3 | 5/30 | 9/30 |
| 8^{th} antigen* | MCRH4730-1 | 20/2 | 0/20 | 6/20 |
| positive control* | OmpCD | 50/5 | 14/50 | 8/47 |
| negative control, | | 50/5 | 11/50 | 8/47 |
| IC31 ® alone^{x} | | | | |
| negative control, | | 50/5 | 7/50 | 13/49 |
| PBS alone | | | | |

*17.5 μl antigen plus 2.5 μl IC31 ® adjuvant
^{x}17.5 μl buffer (50 mM Tris/HCl pH 8) plus 2.5 μl IC31 ® adjuvant

### CONCLUSIONS

[0464] There is significant correlation of the data from two independently performed studies using two different mouse pulmonary clearance models, except in the case of antigen MCRH2506-1, which showed a significant effect only in the second model which employed mucosal immunization route and adjuvant. Compared to adjuvant control in both nasopharyngeal lavage (NAL) and lung tissue MCRH2506-1 induced >1 log reduction in bacterial CFU; similar protective effects of this antigen were reported using mouse pulmonary clearance model which employed different mouse strain and challenge by inhalation of bacteria in the presence of anesthetic (Ruckdeschel E A et al., 2009). Considering the fact that Moraxella catarrhalis is not mouse pathogen and is easily cleared by mouse immune system, slight differences in the mouse physiology, mode of challenge, immunization route and the time window during which tissue samples are removed for measuring bacterial load are all expected to add to variation in the data obtained in different models. Interestingly, the antigens MCRH3759-1 and MCRH4730-1 which showed effects only in nasopharyngeal lavage (NAL) in the mucosal immunization model, also showed effects only in bronchoalveolar lavage (BAL) in the systemic immunization pulmonary clearance model. This may suggest that these antigens may be effective in preventing bacterial adherence to the respiratory epithelium, but are less effective in clearing already established infection within deeper layers of lung tissue. Additional antigens which provided more effective bacterial clearance in both models include: MCRH2844-1 and MCRH0759-1. Therefore, these data additionally confirm the selection of candidate antigens for testing in the future studies.

### REFERENCES

[0465] The following references which have been recited in the present specification in a truncated version are incorporated herein by reference in their entirety.
[0466] Altschul, S., et al. (1990). Journal of Molecular Biology 215: 403-10.
[0467] Amit, A. G., et al. (1986). Science 233: 747-753.
[0468] Becker, P. D., et al. (2007). Infection and Immunity 75: 1778-1784.
[0469] Bennett, D., et al. (1995). J Mol Recognit 8: 52-8.
[0470] Bootsma, H. J., et al. (2000). J. Infect. Dis. 181: 1376-1387.
[0471] Budhani, R. K., et al. (1998). Antimicrobial Agents and Chemotherapy 42: 2521-2526.
[0472] Carter, P., et al. (1985). Nucl. Acids Res. 13: 4431-4443.
[0473] Catlin, B. W. (1990). Clin. Microbiol. Reviews 3: 293-320.
[0474] Christensen, J. J., et al. (1994). FEMS Microbiol. Lett. 119:155-160.
[0475] Clackson, T., et al. (1991). Nature 352: 624-8.
[0476] Cohen, J. (1993). Science 259: 1691-1692.
[0477] Cripps, A. W. and Otczyk, D. C. (2006). Expert Rev Vaccines 5: 517-34.
[0478] Current Protocols in Molecular Biology, John Wiley and Sons, Inc. (1987).
[0479] Devereux, J., et al. (1984). Nucleic acids research 12: 387-95.
[0480] de Vries, S. P., et al. (2010). Genome analysis of Moraxella catarrhalis strain RH4: a human respiratory tract pathogen. J. Bacteriol. 2010 May 7. [Epub ahead of print].
[0481] Doern, G. V., et al. (1980). J. of Clin. Microbiol. 11: 193-195.
[0482] Doherty, E., et al. (2001). Annu Rev Biophys Biomol Struct 30: 457-475.
[0483] Eisenbraun, M., et al. (1993). DNA Cell Biol 12: 791-7.
[0484] Etz, H., et al. (2001). J Bacteriol 183: 6924-35.
[0485] Foxwell, A. R., et al. (1998). Microbiol Mol Biol Rev. 62: 294-308.
[0486] Ganz, T. (1999). Science 286: 420-421.
[0487] Georgiou, G. (1997). Nature Biotechnology 15: 29-34.
[0488] Heiniger, N., et al. (2007). J. of Infect. Dis. 196: 1080-1087.
[0489] Hemmer, B., et al. (1999). Nat Med 5: 1375-82.
[0490] Holm, M. M., et al. (2004). Infection and immunity 72(4): 1906-1913.
[0491] Hornef, M., et al. (2002). Nat Immunol 3: 1033-40.
[0492] Huse, W. D., et al. (1988). Science 246: 1275-1281.
[0493] Ishibashi, S., et al. (1993). J. Clin. Invest. 92: 883-893.
[0494] Janda, W. M., et al. (1987). J Clin Microbiol 25: 203-206.
[0495] Johanson, K., et al. (1995). J Biol Chem 270: 9459-71.
[0496] Jones, P., et al. (1986). Nature 321: 522-5.
[0497] Kajava, A., et al. (2000). J Bacteriol 182: 2163-9.
[0498] Karalus, R., et al. (2000). Microbes and Infection 2: 547-559.
[0499] Kay, M., et al. (1994). Proc. Natl. Acad. Sci. USA 91: 2353-2357.
[0500] Kö hler, G., et al. (1975). Nature 256: 495-7.
[0501] Kolaskar, A. S., and Tongaonkar, P. C. (1990). FEBS Lett 276: 172-4.
[0502] Krishnamurthy, A., et al. (2009). Microbes Infect 11(5): 545-53.
[0503] Lewin, A., et al. (2001). Trends Mol Med 7: 221-8.
[0504] Marcy, S. M., (2004). Cleve Clin J Med. 71: S3-9.
[0505] Marks, J., et al. (1992). Biotechnology (N Y) 10: 779-83.
[0506] Mawas, F., et al. (2009). Expert Rev. Vaccines 8: 77-90.
[0507] McCafferty, J., et al. (1990). Nature 348: 552-4.
[0508] McMichael, J. C. (2001). Vaccine 19: S101-S107.
[0509] Murphy, T. F., et al. (1998). J. Infect. Dis. 178: 1667-1675.
[0510] Murphy, T. F. (2005). Expert Rev Vaccines 4: 843-53.
[0511] Nagy, E., et al. (2003). Identification of the “antigenome”—a novel tool for design and development of subunit vaccines against bacterial pathogens. In Genomics, Proteomics and Vaccines (G. Grandi, ed), John Wiley & Sons Ltd., UK.
[0512] Okano, H., et al. (1991). J Neurochem 56: 560-7.
[0513] Pingault, N. M., et al. (2007). J. of App. Microbiol. 103: 2489-2495.
[0514] Pingault, N. M., et al. (2008). J. Microbiol. Methods 75: 344-345.
[0515] Prymula, R., et al. (2006). Lancet 367: 740-748.
[0516] Queen, C., et al. (1989). Proc. Natl. Acad. Sci. USA 86: 10029-10033.
[0517] Rammensee, H., et al. (1999). Immunogenetics 50: 213-9.
[0518] Rao, V. K., et al. (1999). FEMS Microbiol Rev. 23: 99-129. Remington's Pharmaceutical Sciences, by E. W. Martin, Mack Publishing Co., Easton, Pa., 15th Edition (1975).
[0519] Riechmann, L., et al. (1988). Nature 332: 323-327.
[0520] Ruckdeschel, E. A., et al. (2008). Infection and Immunity 76: 1599-1607.
[0521] Ruckdeschel, E. A., et al. (2009). Vaccine 27: 7065-7072.
[0522] Schaller, A., et al. (2006). Proteomics 6: 172-80.
[0523] Seeger, C., et al. (1984). Proc Natl Acad Sci USA 81: 5849-52.
[0524] Skerra, A. (1994). Gene 151: 131-5.
[0525] Slevogt, H., et al. (2007). Cell. Microbiol. 9: 694-707.
[0526] Tan, T., et al. (2007a). Expert Rev. Vaccines 6: 949-956.
[0527] Tan, T., et al., (2007b). The J. of Infect. Dis. 195: 1661-1670.
[0528] Tang, D., et al. (1992). Nature 356: 152-4.
[0529] Tempest, P., et al. (1991). Biotechnology (N Y) 9: 266-71.
[0530] Tourdot, S., et al. (2000). Eur J Immunol 30: 3411-21.
[0531] VandeWoude, S. J., et al. (1991). Lab. Anim. Sci. 41: 401-406.
[0532] Verduin, C. M., et al. (2000). FEMS Microbiol. Lett. 184: 1-8.
[0533] Verduin, C. M., et al. (2002). Clin. Microbiol. Reviews 15: 125-144.
[0534] von Heinje, G. (1987). Sequence Analysis in Molecular Biology, Academic Press.
[0535] Wang, P., et al. (2008). PLoS Comput Biol 4:e1000048.
[0536] Wells, J. A., et al. (1985). Gene 34: 315-323.
[0537] Wells, J. A., et al. (1986). Philos. Trans. R. Soc. London Ser. A 317: 415.
[0538] Zhang, Q., et al. (2008). Nucleic Acids Res. 1; 36 (Web Server issue):W513-8. Epub 2008 May 31.
[0539] Zoller, M. J., et al. (1987). Nucl. Acids Res. 10: 6487-6500.

[0540] The features of the present invention disclosed in the specification, the claims and/or the drawings may both separately and in any combination thereof be material for realizing the invention in various forms thereof.

1. An isolated nucleic acid molecule encoding an antigen or a fragment thereof, comprising a nucleic acid sequence, which is selected from the group consisting of:
a) a nucleic acid molecule having at least 70% sequence identity to a nucleic acid molecule having a nucleotide sequence selected from the group comprising SEQ ID NOs 860 to 886 and 1 to 214,
b) a nucleic acid molecule which is complementary to the nucleic acid molecule of a),
c) a nucleic acid molecule comprising at least 15 sequential bases of the nucleic acid molecule of a) or b),
d) a nucleic acid molecule which anneals under stringent hybridisation conditions to the nucleic acid molecule of a), b), or c),
e) a nucleic acid molecule which, but for the degeneracy of the genetic code, would hybridize to the nucleic acid molecule defined in a), b), c), or d).

2.-7. (canceled)

8. A vector comprising a nucleic acid molecule according to claim 1.

9. (canceled)

10. A host cell comprising the vector as defined in claim 8.

11. An antigen that is immunologically reactive with sera from a human having a Moraxella infection, or from an uninfected healthy human who was previously infected with Moraxella, wherein the antigen comprises or consists of an isolated polypeptide or an active fragment or an active variant thereof from Moraxella, most preferably from Moraxella catarrhalis.

12. An antigen comprising or consisting of an isolated polypeptide selected from the group consisting of SEQ ID NOs 887 to 913 and 215 to 428, or an active fragment or an active variant thereof.

13. An antigen that is immunologically reactive with sera from a human having a Moraxella infection, or from an uninfected healthy human who was previously infected with Moraxella, wherein the antigen comprises or consists of an isolated polypeptide or an active fragment or an active variant thereof from Moraxella, most preferably from Moraxella catarrhalis, wherein the polypeptide is encoded by a nucleic acid molecule as defined in claim 1.

14. The antigen according to claim 11, wherein the active fragment thereof consists of at least 50%, especially at least 60%, preferably at least 70%, more preferably at least 80%, still more preferably at least 90%, even more preferably at least 95%, 96%, 97% or 98%, most preferably 99% of said polypeptide, especially of a polypeptide as defined by any of the SEQ ID NOs 887 to 913 or 215 to 428.

15. The antigen according to claim 11, wherein the active variant thereof has at least 50%, especially at least 60%, preferably at least 70%, more preferably at least 80%, still more preferably at least 90%, even more preferably at least 95%, 96%, 97% or 98%, most preferably 99% sequence identity to said polypeptide, especially to a polypeptide as defined by any of the SEQ ID NOs 887 to 913 or 215 to 428.

16. The antigen according to claim 11, whereby the antigen further comprises or consists of at least one amino acid residue heterologous to the antigen, preferably a marker protein.

17. The antigen according to claim 16, wherein the additional amino acid residue(s) is/are flanking the antigen N-terminally, C-terminally or N- and C-terminally.

18. The antigen according to claim 11, whereby the antigen further comprises or consists of either a leader or a secretory sequence, a sequence employed for purification, or a proprotein sequence.

19. An antigen comprising at least one core amino acid sequence as indicated in column “Predicted immunogenic aa” or “Predicted class II-restricted T cell epitope/regions” or “Location of identified immunogenic region (aa)” of Table 4, whereby more preferably the core amino acid sequence is selected from the group consisting of:
amino acids 4-10, 12-40, 46-52, 61-76, 78-94, 96-103, 107-114, 126-133, 135-150, 153-162, 167-174, 182-195, 199-208, 210-218, 226-244, 247-255, 262-276, 285-292, 9-99, 108-128, 132-169, 179-286, and 17-72 of SEQ ID NO 215; amino acids 7-17, 25-32, 36-53, 66-76, 83-91, 100-113, 124-131, 151-158, 168-179, 184-198, 213-225, 227-237, 247-256, 261-270, 275-281, 284-293, 295-305, 315-329, 345-358, 388-415, 436-443, 449-456, 471-483, 1-168, 180-204, 212-253, 261-313, 326-467, 472-486, 10-60, 92-130, and 207-280 of SEQ ID NO 216; amino acids 45-53, 58-65, 70-78, 81-87, 94-100, 163-179, 184-192, 201-207, 212-222, 224-230, 254-260, 263-268, 18-158, 163-232, and 211-260 of SEQ ID NO 217; amino acids 4-12, 25-33, 40-50, 62-69, 74-85, 97-109, 127-138, 141-149, 153-161, 197-203, 206-215, 217-223, 258-265, 272-286, 308-316, 325-335, 343-358, 366-371, 373-381, 400-406, 417-426, 444-458, 466-486, 498-514, 522-539, 544-555, 561-572, 603-619, 621-638, 658-672, 687-695, 710-723, 731-744, 747-752, 764-769, 789-805, 808-823, 830-840, 873-885, 888-900, 902-920, 930-943, 964-970, 992-1003, 1005-1016, 1033-1038, 1045-1057, 1059-1068, 1089-1096, 1104-1110, 1115-1142, 1150-1156, 1158-1169, 1188-1198, 1200-1205, 1-80, 88-153, 167-222, 231-249, 256-289, 304-337, 340-488, 491-679, 681-780, 803-878, 880-942, 951-986, 988-1014, 1030-1106, 1109-1133, 1136-1179, 1183-1203, 128-158, 161-232, 277-314, 590-627, 712-848, 957-963, 1007-1033, and 1074-1093 of SEQ ID NO 218; amino acids 4-29, 45-56, 68-78, 84-97, 100-109, 127-141, 145-151, 173-179, 189-197, 202-209, 214-220, 238-263, 266-279, 288-297, 307-315, 330-336, 343-351, 358-367, 373-382, 388-403, 412-421, 423-429, 435-441, 449-459, 462-468, 488-501, 503-522, 536-542, 559-572, 603-611, 623-630, 675-681, 684-690, 705-719, 1-33, 45-204, 210-414, 431-480, 486-532, 536-582, 597-691, 704-724, 496-512, and 542-618 of SEQ ID NO 219; amino acids 14-24, 50-70, 76-92, 100-128, 130-143, 150-155, 178-187, 215-221, 233-251, 261-267, 275-288, 295-301, 319-324, 339-364, 368-384, 404-453, 461-472, 493-510, 522-532, 534-550, 570-577, 598-633, 641-655, 666-672, 676-682, 762-772, 793-808, 819-826, 836-858, 860-867, 872-896, 900-907, 909-918, 929-948, 961-974, 990-1003, 1005-1015, 1018-1025, 1066-1076, 1081-1090, 1100-1113, 1124-1131, 1146-1152, 1191-1197, 1202-1208, 1214-1231, 1237-1254, 1282-1310, 1313-1325, 1333-1353, 1365-1378, 6-26, 35-55, 58-163, 166-184, 190-252, 258-300, 305-493, 495-559, 567-587, 591-654, 672-750, 753-813, 827-866, 870-889, 898-983, 993-1011, 1038-1107, 1139-1162, 1168-1191, 1199-1256, 1261-1355, 1365-1387, 199-293, 420-438, 643-694, 719-771, 823-881, 1050-1144, and 1267-1339 of SEQ ID NO 220; amino acids 14-42, 50-65, 69-81, 96-109, 122-129, 146-161, 170-184, 194-200, 206-215, 221-234, 241-248, 264-270, 273-281, 288-299, 303-316, 320-338, 345-352, 365-372, 426-443, 475-484, 499-515, 518-524, 537-546, 555-563, 565-572, 582-588, 601-608, 612-629, 642-647, 662-683, 698-703, 706-711, 718-731, 739-746, 758-766, 776-782, 801-807, 825-835, 840-852, 878-886, 889-897, 908-915, 920-933, 935-946, 972-979, 982-992, 1003-1008, 1013-1023, 1030-1042, 1065-1081, 1095-1103, 1116-1126, 1132-1138, 1155-1173, 1176-1184, 1186-1199, 1203-1209, 1216-1224, 1242-1262, 1270-1282, 1295-1306, 1308-1316, 1342-1348, 1352-1357, 1-74, 84-228, 233-258, 264-383, 391-449, 451-490, 496-547, 559-610, 616-635, 640-731, 752-778, 799-862, 874-990, 1064-1110, 1114-1138, 1144-1167, 1183-1203, 1209-1230, 1241-1281, 1289-1363, 443-561, 644-713, 767-806, and 990-996 of SEQ ID NO 221; amino acids 4-19, 25-33, 36-51, 53-67, 105-110, 1-72, 74-108, and 55-108 of SEQ ID NO 222; amino acids 15-36, 42-96, 101-112, 3-115, and 4-23 of SEQ ID NO 223; amino acids 4-10, 12-22, 25-32, 35-48, 54-59, 65-70, 100-111, 115-126, 132-149, 156-164, 166-188, 197-207, 220-235, 243-265, 272-278, 309-318, 322-329, 340-353, 355-370, 378-388, 393-398, 410-417, 441-447, 449-455, 1-227, 248-378, 395-427, 445-459, and 310-399 of SEQ ID NO 224; amino acids 5-39, 1-40, and 3-52 of SEQ ID NO 225; amino acids 10-16, 20-40, 58-80, 83-89, 98-119, 126-132, 138-149, 173-179, 193-210, 229-235, 242-248, 266-272, 293-301, 303-315, 335-350, 355-362, 368-377, 379-390, 402-408, 420-431, 438-443, 451-464, 471-476, 486-501, 504-525, 547-568, 606-612, 637-644, 649-656, 685-701, 728-740, 774-780, 784-791, 793-800, 806-816, 818-834, 853-860, 878-888, 890-895, 926-937, 969-976, 983-997, 1-48, 54-82, 101-122, 126-184, 186-235, 237-325, 350-443, 448-512, 523-545, 553-583, 595-623, 634-657, 660-729, 732-786, 804-841, 845-975, 980-1000, 23-130, 227-257, 269-346, 680-775, 817-894, and 922-983 of SEQ ID NO 226; amino acids 4-31, 34-55, 98-105, 127-137, 157-175, 187-194, 228-238, 255-262, 268-273, 281-296, 302-307, 314-327, 329-339, 346-352, 394-401, 407-416, 452-458, 466-477, 534-550, 561-571, 573-580, 597-605, 610-622, 624-630, 639-644, 650-656, 666-672, 689-696, 706-712, 728-735, 743-748, 785-790, 803-812, 820-825, 827-833, 843-848, 861-868, 4-51, 95-116, 125-207, 217-244, 254-363, 375-426, 440-469, 474-506, 527-574, 576-641, 653-682, 750-800, 803-835, 29-69, 204-337, 400-502, and 578-765 of SEQ ID NO 227; amino acids 8-16, 19-52, 61-68, 77-86, 88-98, 106-116, 126-131, 143-153, 163-178, 183-191, 211-217, 6-56, 85-99, 106-127, 140-222, and 101-185 of SEQ ID NO 228; amino acids 15-26, 46-53, 59-68, 75-86, 93-104, 116-122, 126-140, 154-165, 175-181, 206-216, 230-243, 251-257, 294-301, 305-311, 324-336, 364-372, 374-381, 394-400, 419-427, 435-447, 451-459, 1-108, 114-192, 208-285, 310-348, 375-483, 32-98, 122-144, 157-323, 336-351, 369-389, and 433-440 of SEQ ID NO 229; amino acids 4-10, 12-23, 27-40, 42-49, 59-67, 94-99, 1-41, 47-100, and 7-58 of SEQ ID NO 230; amino acids 4-22, 38-52, 110-117, 122-132, 144-154, 167-175, 1-29, 33-61, 71-128, 138-189, 24-38, 46-67, and 128-177 of SEQ ID NO 231; amino acids 4-9, 13-29, 39-45, 50-64, 67-77, 85-94, 103-120, 127-146, 148-156, 163-178, 180-192, 204-211, 213-238, 241-256, 266-295, 1-21, 42-140, 145-261, 263-315, and 135-227 of SEQ ID NO 232; amino acids 4-15, 33-58, 67-120, 129-139, 144-171, 1-178, and 7-61 of SEQ ID NO 233; amino acids 18-24, 26-34, 40-47, 53-70, 74-88, 103-125, 128-137, 150-159, 164-174, 181-188, 201-209, 220-230, 232-238, 249-272, 278-287, 290-303, 318-332, 346-353, 379-387, 394-419, 421-430, 433-441, 443-450, 470-488, 498-507, 509-524, 532-539, 543-550, 557-579, 602-608, 611-617, 624-632, 641-657, 671-676, 694-701, 720-730, 753-762, 764-785, 792-797, 801-807, 817-840, 853-859, 868-874, 878-894, 899-913, 915-921, 929-935, 1-43, 49-70, 100-164, 173-192, 198-258, 265-306, 315-371, 373-433, 438-461, 465-523, 525-741, 761-785, 787-808, 810-925, 937-953, 288-408, 577-608, 622-764, 826-899, and 923-948 of SEQ ID NO 234; amino acids 10-23, 36-44, 46-63, 70-79, 89-106, 118-128, 140-149, 161-170, 197-207, 233-245, 1-185, 190-234, 240-254, and 182-251 of SEQ ID NO 235; amino acids 6-20, 26-32, 41-47, 50-72, 75-83, 102-112, 114-140, 156-172, 178-187, 197-218, 228-269, 275-297, 307-336, 352-368, 370-377, 387-397, 1-399, and 303-363 of SEQ ID NO 236; amino acids 8-38, 40-46, 53-70, 88-94, 127-136, 140-145, 154-174, 186-191, 198-226, 236-243, 249-256, 260-266, 269-280, 320-333, 342-349, 357-363, 365-381, 385-430, 433-449, 456-465, 467-475, 488-493, 498-503, 510-520, 557-609, 618-624, 631-644, 646-673, 679-685, 690-696, 698-734, 780-797, 802-808, 810-829, 831-870, 879-890, 910-916, 926-942, 944-980, 1-76, 82-103, 105-156, 158-289, 295-474, 506-557, 565-803, 806-857, 867-898, 914-988, and 888-947 of SEQ ID NO 237; amino acids 16-23, 25-33, 41-53, 56-63, 70-79, 87-98, 100-111, 120-128, 131-149, 160-171, 214-230, 232-242, 247-255, 259-266, 273-282, 284-292, 308-347, 355-364, 370-376, 379-386, 554-563, 10-182, 212-232, 236-358, 364-409, 461-475, 478-498, 542-577, 140-160, 232-300, 321-394, and 514-522 of SEQ ID NO 238; amino acids 9-35, 39-51, 54-67, 71-78, 93-102, 105-116, 122-129, 138-147, 155-162, 168-192, 194-231, 253-261, 264-276, 281-293, 8-241, 244-265, 269-302, and 152-279 of SEQ ID NO 239; amino acids 35-56, 61-70, 74-101, 120-129, 152-165, 171-183, 192-224, 241-271, 278-285, 291-301, 303-319, 334-340, 367-391, 401-426, 437-442, 446-469, 475-488, 495-520, 523-529, 532-541, 543-550, 554-564, 570-598, 624-630, 633-638, 643-655, 663-685, 687-694, 698-725, 735-751, 758-765, 778-795, 1-22, 36-70, 72-128, 141-223, 231-267, 270-334, 339-605, 613-652, 655-778, 115-232, 312-332, 539-555, and 558-620 of SEQ ID NO 240; amino acids 15-39, 54-61, 65-71, 84-89, 98-111, 126-144, 154-160, 189-196, 199-206, 218-224, 259-275, 1-170, 175-230, 244-278, and 162-217 of SEQ ID NO 241; amino acids 22-37, 45-57, 59-65, 82-93, 102-112, 160-172, 200-207, 229-236, 244-268, 275-322, 327-344, 346-369, 376-414, 428-451, 459-490, 495-527, 531-555, 561-582, 600-612, 616-622, 625-635, 638-669, 683-709, 726-732, 735-763, 11-57, 72-88, 99-122, 139-221, 236-274, 279-328, 332-766, 60-145, and 187-223 of SEQ ID NO 242; amino acids 4-12, 32-78, 81-89, 91-100, 105-111, 125-132, 170-176, 179-189, 194-204, 223-229, 235-245, 259-276, 282-289, 303-313, 318-326, 334-345, 350-356, 364-370, 387-405, 409-422, 424-430, 442-457, 459-465, 490-516, 521-532, 534-541, 566-571, 1-208, 230-310, 315-438, 440-456, 467-580, 186-238, and 398-572 of SEQ ID NO 243; amino acids 14-20, 28-35, 41-47, 52-61, 73-86, 92-103, 124-141, 143-158, 172-180, 185-191, 193-221, 239-250, 262-273, 280-290, 304-324, 328-357, 367-376, 378-384, 394-401, 420-428, 439-458, 460-469, 474-492, 22-125, 130-150, 157-177, 179-368, 403-495, 59-74, 94-141, 143-203, and 297-362 of SEQ ID NO 244; amino acids 8-17, 25-39, 41-67, 69-85, 93-115, 123-143, 145-157, 166-174, 178-185, 188-199, 204-210, 221-238, 245-252, 257-268, 284-290, 294-306, 312-320, 1-170, 175-247, 261-323, 17-28, 61-99, and 221-240 of SEQ ID NO 245; amino acids 5-14, 16-26, 28-45, 54-60, 72-82, 98-104, 106-114, 121-132, 137-164, 169-175, 188-194, 214-220, 233-239, 283-296, 302-310, 336-347, 357-364, 400-407, 419-425, 433-439, 443-452, 464-470, 492-499, 511-521, 528-534, 536-548, 564-571, 577-595, 597-611, 615-623, 637-649, 652-670, 681-700, 716-724, 726-738, 766-792, 806-833, 839-851, 853-872, 880-899, 905-912, 919-927, 935-956, 958-970, 980-988, 990-995, 1004-1013, 1017-1031, 1033-1039, 1043-1055, 1059-1068, 1087-1093, 1105-1114, 1116-1122, 1128-1134, 1149-1158, 1164-1172, 1197-1204, 1208-1215, 1230-1244, 1284-1290, 8-53, 68-252, 265-283, 287-320, 329-353, 357-383, 389-470, 475-495, 507-527, 534-749, 773-870, 876-898, 906-928, 938-1150, 1153-1255, 1267-1287, 1291-1314, 291-408, 411-425, 500-552, 719-741, 975-1034, 1089-1156, 1203-1234, and 1273-1301 of SEQ ID NO 246; amino acids 9-20, 25-40, 48-61, 70-84, 89-113, 116-145, 161-181, 183-193, 196-212, 217-229, 235-246, 251-276, 284-290, 300-325, 338-349, 365-376, 387-393, 401-421, 429-438, 448-458, 6-382, 385-465, 204-286, and 310-463 of SEQ ID NO 247; amino acids 9-47, 52-61, 63-76, 82-88, 95-106, 112-126, 132-138, 145-154, 162-176, 178-223, 228-234, 236-247, 253-290, 300-307, 311-325, 327-347, 353-361, 379-408, 426-436, 454-460, 490-504, 506-517, 526-532, 539-545, 550-574, 580-591, 598-612, 616-622, 625-634, 652-668, 670-679, 682-688, 1-463, 466-510, 519-641, 647-702, 7-54, 198-314, 333-381, 404-452, and 523-549 of SEQ ID NO 248; amino acids 4-20, 24-38, 40-64, 66-85, 8-88, and 15-72 of SEQ ID NO 249; amino acids 6-15, 28-33, 35-46, 54-65, 74-108, 141-146, 172-178, 204-217, 221-231, 242-248, 251-257, 276-294, 298-304, 316-332, 341-353, 356-363, 369-382, 3-44, 64-172, 175-191, 202-348, 56-110, 143-224, and 252-308 of SEQ ID NO 250; amino acids 4-28, 49-60, 66-71, 158-164, 215-221, 254-275, 288-294, 318-326, 338-344, 366-380, 389-395, 400-421, 423-430, 450-458, 465-470, 474-491, 495-504, 512-517, 543-563, 577-582, 587-594, 617-623, 631-637, 644-652, 677-691, 694-700, 705-733, 748-783, 791-819, 833-840, 847-854, 876-886, 1-39, 46-64, 80-100, 105-130, 142-162, 166-233, 249-342, 352-467, 470-511, 539-591, 596-687, 689-859, and 609-738 of SEQ ID NO 251; amino acids 7-31, 42-54, 56-64, 94-110, 112-122, 128-136, 172-195, 198-224, 256-263, 281-287, 298-310, 340-346, 356-372, 1-147, 155-276, 278-319, 329-387, 391-405, and 87-164 of SEQ ID NO 252; amino acids 4-20, 33-41, 58-65, 78-86, 93-100, 102-108, 114-161, 194-200, 202-212, 218-225, 230-235, 243-250, 269-278, 291-301, 312-317, 329-340, 352-375, 416-422, 427-434, 443-453, 468-476, 481-491, 510-532, 537-554, 560-566, 574-588, 612-623, 653-663, 678-702, 721-728, 742-748, 770-778, 796-805, 807-817, 824-832, 856-864, 871-878, 885-900, 1-20, 27-172, 175-195, 218-270, 276-308, 334-388, 409-449, 451-712, 741-824, 828-913, 16-32, 133-197, 277-385, 556-573, and 798-874 of SEQ ID NO 253; amino acids 7-14, 17-30, 35-40, 62-69, 80-86, 88-99, 109-118, 120-133, 154-179, 203-209, 216-226, 237-245, 253-260, 265-273, 286-291, 315-339, 353-371, 390-398, 412-430, 435-448, 456-464, 476-487, 492-503, 522-533, 537-549, 579-590, 606-622, 648-654, 664-679, 681-692, 700-711, 718-730, 743-752, 763-798, 808-815, 823-838, 846-864, 891-925, 927-933, 935-948, 25-79, 83-126, 151-284, 292-408, 415-511, 532-577, 594-627, 634-735, 740-809, 815-866, 885-916, 53-163, 191-246, 457-515, 520-528, 620-642, 759-800, and 894-943 of SEQ ID NO 254; amino acids 21-31, 48-58, 60-66, 83-89, 102-115, 144-154, 159-168, 175-186, 195-200, 206-218, 244-250, 259-272, 293-299, 301-307, 324-330, 339-348, 358-369, 380-391, 404-421, 429-437, 456-467, 481-486, 495-502, 509-533, 536-550, 553-571, 575-580, 599-620, 1-93, 98-116, 118-149, 174-199, 202-302, 319-393, 410-468, 493-578, 582-623, 251-272, 290-363, and 424-502 of SEQ ID NO 255; amino acids 12-19, 30-48, 55-61, 66-74, 103-115, 117-131, 176-183, 192-197, 200-222, 8-52, 80-171, 173-201, 208-237, 240-258, 15-64, 77-168, and 190-252 of SEQ ID NO 256; amino acids 4-19, 31-58, 61-70, 84-96, 104-112, 131-138, 143-165, 168-178, 197-208, 213-220, 255-268, 273-281, 313-320, 334-354, 359-367, 369-376, 382-399, 406-420, 429-439, 441-461, 463-507, 513-544, 550-557, 569-580, 583-589, 598-618, 640-650, 675-680, 683-711, 713-739, 797-805, 1-55, 59-164, 168-185, 193-238, 244-333, 343-375, 378-517, 521-583, 602-656, 670-761, 788-808, 124-151, 326-341, and 567-720 of SEQ ID NO 257; amino acids 5-12, 22-37, 47-75, 78-94, 102-107, 110-118, 124-130, 140-154, 161-166, 185-193, 205-213, 218-237, 244-257, 264-269, 276-283, 289-315, 317-323, 334-341, 1-105, 121-344, 141-168, and 256-313 of SEQ ID NO 258; amino acids 33-48, 56-63, 65-79, 84-101, 109-122, 127-160, 211-216, 224-229, 239-256, 1-108, 110-265, 4-75, and 108-199 of SEQ ID NO 259; amino acids 6-14, 24-40, 47-60, 79-98, 102-108, 114-120, 122-132, 154-160, 168-179, 187-206, 221-226, 231-253, 255-268, 296-314, 316-337, 341-347, 357-378, 383-407, 418-425, 443-452, 456-462, 485-495, 503-510, 512-523, 533-543, 550-555, 1-101, 115-152, 154-203, 210-314, 321-368, 375-412, 414-434, 438-494, 497-529, 544-558, 35-136, and 348-355 of SEQ ID NO 260; amino acids 4-11, 14-22, 24-29, 33-40, 42-52, 54-70, 87-111, 121-128, 132-143, 149-168, 180-190, 197-215, 223-232, 244-251, 296-319, 328-349, 363-368, 378-399, 414-431, 434-440, 451-457, 1-27, 29-48, 59-199, 206-257, 264-378, 398-459, and 322-374 of SEQ ID NO 261; amino acids 4-20, 28-34, 36-42, 56-72, 80-86, 97-110, 118-127, 132-138, 145-150, 173-179, 181-195, 232-244, 250-263, 270-276, 308-314, 324-331, 336-343, 355-364, 398-403, 1-37, 52-81, 93-152, 173-252, 266-406, 29-90, and 125-197 of SEQ ID NO 262; amino acids 15-23, 31-38, 51-66, 89-105, 123-130, 135-140, 149-154, 198-208, 212-220, 228-239, 249-257, 261-267, 275-281, 300-310, 322-343, 354-365, 372-384, 394-404, 409-420, 422-429, 446-455, 459-468, 1-87, 104-194, 199-392, 404-425, 443-466, 82-164, 236-325, and 392-453 of SEQ ID NO 263; amino acids 4-10, 17-46, 51-80, 87-92, 99-121, 135-150, 170-176, 200-212, 243-252, 277-282, 310-331, 340-349, 1-160, 168-188, 200-263, 276-355, and 126-294 of SEQ ID NO 264; amino acids 4-18, 35-48, 52-67, 73-80, 90-96, 108-147, 156-171, 188-207, 227-234, 239-248, 263-286, 301-330, 347-363, 365-395, 409-419, 421-431, 442-447, 454-468, 471-482, 484-510, 517-525, 545-555, 1-62, 84-178, 182-264, 295-396, 403-452, 461-502, 520-568, 53-62, 112-187, 233-265, and 375-402 of SEQ ID NO 265; amino acids 13-31, 36-48, 54-64, 67-83, 93-104, 106-126, 128-137, 144-154, 161-169, 179-196, 205-221, 232-255, 257-263, 265-305, 307-324, 326-340, 354-367, 372-378, 383-402, 14-409, 23-124, and 134-172 of SEQ ID NO 266; amino acids 5-21, 26-35, 37-44, 57-69, 71-78, 84-93, 95-101, 1-78, 81-112, and 41-103 of SEQ ID NO 267; amino acids 13-19, 21-42, 47-55, 57-66, 68-74, 77-82, 84-90, 92-101, 106-112, 147-169, 171-183, 185-200, 221-230, 240-252, 269-275, 284-296, 299-308, 311-322, 332-342, 344-358, 374-382, 386-391, 403-412, 445-451, 462-477, 484-494, 557-563, 565-574, 1-47, 50-65, 80-108, 121-135, 145-234, 236-322, 326-379, 396-488, 502-522, 564-589, 14-77, 217-269, and 380-542 of SEQ ID NO 268; amino acids 4-34, 36-44, 51-57, 63-68, 70-80, 91-130, 136-173, 186-193, 195-201, 207-213, 226-234, 242-266, 268-284, 290-308, 315-332, 368-378, 386-402, 413-437, 1-87, 89-172, 175-193, 222-244, 247-366, 381-409, 416-437, 191-197, and 350-438 of SEQ ID NO 269; amino acids 11-24, 29-51, 61-91, 98-116, 119-129, 132-142, 10-66, 69-102, 111-145, and 2-98 of SEQ ID NO 270; amino acids 16-49, 55-74, 78-88, 91-112, 119-127, 140-145, 156-165, 167-173, 199-209, 234-249, 251-263, 265-272, 282-290, 299-305, 322-330, 1-333, 32-89, 108-141, and 246-333 of SEQ ID NO 271; amino acids 19-43, 49-55, 78-92, 1-65, 68-113, and 45-108 of SEQ ID NO 272; amino acids 15-23, 52-84, 97-103, 110-133, 149-154, 160-183, 203-227, 233-241, 243-250, 313-330, 338-351, 373-382, 384-396, 401-407, 425-452, 469-474, 476-482, 490-513, 519-528, 533-545, 591-613, 619-649, 23-105, 115-152, 154-220, 226-263, 276-296, 302-368, 378-402, 414-477, 481-536, 539-581, 588-652, 158-222, 327-423, and 427-526 of SEQ ID NO 273; amino acids 4-11, 19-29, 43-52, 82-96, 101-110, 138-144, 157-165, 258-268, 326-334, 336-344, 346-358, 377-383, 386-394, 397-405, 413-427, 429-434, 437-443, 449-458, 486-495, 514-521, 535-546, 554-560, 566-578, 589-596, 603-612, 618-625, 644-659, 662-671, 675-680, 707-720, 722-735, 737-752, 754-771, 788-802, 816-830, 836-844, 851-870, 884-909, 39-105, 132-176, 183-247, 258-292, 300-324, 328-398, 405-506, 512-532, 544-653, 659-838, 840-885, 78-130, 215-292, 655-713, and 818-880 of SEQ ID NO 274; amino acids 5-14, 21-27, 29-37, 46-72, 83-96, 113-121, 129-134, 1-63, 81-141, and 58-141 of SEQ ID NO 275; amino acids 4-9, 20-34, 36-54, 88-94, 124-148, 155-161, 182-202, 204-211, 220-232, 1-53, 75-116, 126-174, 177-235, and 92-234 of SEQ ID NO 276; amino acids 4-22, 31-38, 49-55, 82-91, 1-24, 28-49, and 7-65 of SEQ ID NO 277; amino acids 4-28, 30-83, 85-92, 94-123, 125-157, 163-196, 216-234, 240-258, 260-289, 307-313, 315-323, 328-378, 392-424, 428-440, 458-472, 474-482, 491-506, 508-530, 539-564, 1-298, 301-566, 14-31, and 282-347 of SEQ ID NO 278; amino acids 7-17, 20-28, 30-37, 39-47, 49-61, 77-96, 114-128, 149-154, 166-180, 182-200, 240-248, 256-271, 1-158, 163-275, 60-112, and 149-246 of SEQ ID NO 279; amino acids 6-25, 31-37, 43-57, 63-72, 82-90, 96-107, 109-118, 123-140, 144-149, 155-162, 168-182, 184-190, 213-219, 237-244, 247-256, 262-268, 271-284, 295-301, 307-320, 325-337, 346-364, 1-46, 48-196, 208-231, 234-278, 290-374, and 184-277 of SEQ ID NO 280; amino acids 27-46, 53-77, 103-123, 130-142, 153-159, 171-179, 182-209, 215-222, 224-233, 237-243, 271-276, 2-210, 215-271, and 12-138 of SEQ ID NO 281; amino acids 17-24, 38-45, 49-67, 80-86, 94-112, 119-141, 154-159, 165-171, 183-200, 218-226, 234-252, 263-291, 328-336, 338-349, 357-385, 397-405, 423-440, 445-453, 457-466, 470-477, 487-493, 8-134, 141-167, 175-224, 231-473, 479-496, 284-393, and 462-469 of SEQ ID NO 282; amino acids 4-9, 16-23, 56-64, 70-82, 86-93, 1-20, 39-103, and 11-36 of SEQ ID NO 283; amino acids 5-38, 69-77, 83-99, 143-151, 154-160, 176-186, 198-210, 226-268, 270-288, 293-303, 305-324, 327-342, 344-353, 388-394, 432-438, 1-49, 54-69, 96-110, 130-248, 251-270, 312-368, 382-450, 65-116, 179-231, and 328-395 of SEQ ID NO 284; amino acids 8-23, 58-70, 74-80, 85-91, 95-103, 110-127, 143-150, 153-160, 164-171, 189-201, 218-224, 228-233, 236-242, 248-255, 1-27, 30-46, 53-71, 77-171, 181-264, and 3-91 of SEQ ID NO 285; amino acids 4-19, 30-49, 57-83, 88-100, 111-119, 122-129, 154-159, 168-173, 189-200, 222-229, 237-243, 251-259, 1-22, 33-51, 55-99, 114-139, 163-204, 220-250, and 108-262 of SEQ ID NO 286; amino acids 4-19, 26-51, 53-62, 68-79, 83-96, 99-105, 114-122, 128-135, 138-146, 155-164, 180-199, 201-218, 226-232, 237-249, 257-264, 1-174, 176-277, and 47-117 of SEQ ID NO 287; amino acids 12-17, 23-31, 42-62, 81-88, 96-103, 109-118, 122-128, 136-146, 151-158, 188-203, 210-224, 229-238, 270-287, 296-308, 310-333, 341-354, 361-368, 383-395, 404-420, 423-435, 443-456, 460-503, 510-517, 521-526, 541-548, 565-570, 575-586, 606-617, 625-637, 648-655, 683-696, 702-713, 722-728, 740-748, 779-786, 789-801, 807-812, 820-829, 849-854, 862-868, 9-61, 75-124, 132-288, 299-547, 592-608, 612-660, 666-695, 733-753, 776-813, 818-854, 858-875, 59-133, 260-272, 382-410, 440-515, and 711-872 of SEQ ID NO 288; amino acids 15-24, 28-56, 63-87, 98-104, 112-121, 125-133, 142-159, 166-176, 189-198, 200-207, 216-223, 225-231, 236-243, 245-252, 262-287, 295-304, 315-323, 326-332, 340-356, 361-368, 370-376, 387-398, 401-410, 412-420, 422-434, 442-455, 469-476, 486-496, 507-514, 519-527, 547-556, 559-564, 569-575, 588-594, 604-609, 611-622, 634-662, 676-686, 712-718, 723-738, 752-758, 779-790, 793-822, 833-850, 866-891, 894-908, 935-950, 1-155, 162-181, 186-321, 346-600, 608-760, 778-897, 910-953, 700-781, and 800-903 of SEQ ID NO 289; amino acids 25-31, 41-54, 79-86, 88-96, 111-125, 135-141, 145-152, 159-182, 188-195, 208-214, 257-267, 275-297, 306-312, 326-333, 342-358, 370-377, 399-414, 420-428, 434-439, 446-492, 499-507, 509-521, 527-533, 2-33, 36-217, 231-251, 263-363, 367-427, 430-527, 2-122, and 192-306 of SEQ ID NO 290; amino acids 6-13, 18-26, 28-46, 49-56, 62-69, 74-84, 88-110, 116-132, 135-149, 156-178, 181-191, 202-223, 247-260, 274-281, 295-303, 336-344, 368-375, 377-390, 395-404, 409-433, 450-458, 470-506, 1-83, 100-280, 295-370, 374-509, 63-151, 220-291, and 321-388 of SEQ ID NO 291; amino acids 4-11, 16-27, 31-41, 62-81, 101-108, 116-144, 169-185, 203-218, 228-234, 236-245, 255-273, 283-294, 298-304, 306-313, 315-340, 342-350, 357-371, 378-390, 402-416, 421-436, 444-456, 458-464, 481-487, 496-508, 510-531, 536-541, 544-551, 556-569, 576-590, 600-614, 627-636, 644-651, 664-670, 675-688, 700-720, 727-770, 775-797, 802-818, 828-835, 864-884, 887-892, 899-907, 918-928, 940-958, 965-980, 7-194, 202-235, 261-383, 401-505, 524-617, 624-727, 735-749, 761-879, 898-973, 975-989, 96-113, 634-656, and 658-734 of SEQ ID NO 292; amino acids 4-12, 14-23, 26-35, 51-78, 83-94, 100-106, 109-119, 121-135, 140-149, 153-177, 179-202, 212-224, 229-239, 241-252, 260-312, 330-336, 342-352, 368-383, 393-403, 1-100, 105-343, 365-406, 76-101, and 295-353 of SEQ ID NO 293; amino acids 4-28, 31-38, 65-81, 1-84, and 9-69 of SEQ ID NO 294; amino acids 4-11, 26-35, 55-74, 78-90, 109-115, 125-141, 164-169, 173-181, 193-203, 212-231, 253-266, 289-295, 297-313, 350-356, 380-388, 410-416, 425-433, 449-462, 466-473, 478-497, 562-584, 586-606, 614-619, 718-724, 727-738, 745-752, 782-789, 812-821, 827-834, 844-854, 864-874, 902-908, 920-927, 952-957, 966-973, 982-988, 1010-1019, 1027-1034, 1050-1057, 1082-1088, 1111-1125, 1129-1135, 1150-1163, 1-104, 108-152, 161-190, 195-323, 337-366, 369-410, 415-449, 453-495, 532-552, 559-624, 677-697, 724-751, 784-802, 804-824, 834-931, 949-977, 979-999, 1060-1149, 378-625, and 795-908 of SEQ ID NO 295; amino acids 7-31, 36-49, 59-66, 78-85, 89-95, 101-120, 127-151, 174-183, 185-194, 207-217, 221-230, 238-247, 258-268, 290-297, 309-315, 1-42, 58-233, 236-279, 290-315, and 181-234 of SEQ ID NO 296; amino acids 17-25, 60-72, 80-90, 97-109, 111-117, 1-72, 74-120, and 22-110 of SEQ ID NO 297; amino acids 4-31, 44-53, 55-70, 76-99, 109-115, 123-130, 136-142, 147-155, 158-191, 199-220, 223-235, 243-257, 264-281, 286-299, 313-323, 350-365, 373-391, 397-441, 455-466, 1-35, 45-218, 225-323, 347-386, 388-403, 405-446, 448-469, 105-193, and 327-355 of SEQ ID NO 298; amino acids 4-19, 47-53, 69-75, 81-87, 109-122, 125-140, 142-156, 191-199, 219-238, 246-271, 279-290, 296-302, 305-313, 321-327, 331-345, 1-32, 75-89, 107-127, 133-171, 188-310, 325-349, 43-142, and 300-314 of SEQ ID NO 299; amino acids 4-43, 49-56, 66-74, 80-94, 97-110, 116-136, 139-145, 151-163, 165-178, 182-210, 213-220, 222-231, 241-252, 256-271, 277-293, 300-314, 330-336, 340-363, 369-375, 381-404, 419-426, 439-445, 447-453, 465-501, 1-38, 43-62, 77-137, 140-173, 179-291, 328-376, 386-400, 406-504, 19-76, 195-221, and 271-292 of SEQ ID NO 300; amino acids 4-19, 25-31, 40-63, 71-80, 89-98, 101-119, 125-151, 159-164, 173-201, 219-227, 247-258, 263-284, 308-319, 321-326, 10-99, 101-185, 200-294, 297-347, and 74-161 of SEQ ID NO 301; amino acids 12-18, 25-31, 37-43, 76-94, 121-135, 146-176, 191-199, 205-212, 259-290, 300-313, 340-347, 364-373, 375-385, 413-420, 424-430, 446-462, 465-473, 475-486, 505-522, 537-544, 557-563, 573-582, 588-602, 604-613, 620-630, 638-675, 677-683, 1-28, 33-134, 137-179, 181-221, 255-323, 333-439, 443-532, 537-692, 25-59, 156-270, 272-335, and 557-565 of SEQ ID NO 302; amino acids 10-22, 24-54, 63-70, 77-86, 94-110, 112-133, 1-60, 88-136, and 17-135 of SEQ ID NO 303; amino acids 7-24, 28-47, 76-86, 92-103, 122-129, 135-141, 152-157, 162-173, 192-205, 210-225, 230-236, 270-286, 289-297, 299-314, 316-328, 334-341, 349-356, 376-382, 384-395, 4-47, 50-248, 261-393, 61-67, 168-195, and 257-320 of SEQ ID NO 304; amino acids 4-9, 20-39, 42-48, 67-101, 129-135, 156-162, 170-176, 178-189, 192-197, 228-235, 260-266, 272-278, 291-301, 330-342, 347-360, 367-373, 383-390, 397-409, 432-443, 466-487, 506-517, 520-545, 551-561, 588-598, 602-608, 622-630, 15-126, 129-166, 171-217, 227-307, 309-361, 363-431, 461-496, 501-637, 172-215, 218-291, 417-440, and 498-574 of SEQ ID NO 305; amino acids 8-28, 34-67, 1-70, and 2-32 of SEQ ID NO 306; amino acids 9-26, 33-40, 79-93, 98-105, 112-121, 128-137, 144-156, 160-167, 183-190, 198-204, 210-224, 250-275, 283-289, 296-302, 314-321, 336-344, 346-353, 355-362, 367-380, 382-391, 393-403, 407-413, 416-423, 434-443, 469-492, 499-509, 550-559, 596-603, 613-633, 635-642, 648-659, 1-30, 33-99, 106-126, 129-331, 340-511, 522-565, 578-599, 608-667, 59-118, and 160-215 of SEQ ID NO 307; amino acids 7-20, 25-33, 36-64, 74-83, 117-124, 126-137, 146-159, 164-173, 181-186, 195-231, 240-255, 258-266, 268-276, 283-290, 5-90, 113-250, 260-293, 9-47, 145-198, and 227-239 of SEQ ID NO 308; amino acids 4-24, 31-41, 43-57, 61-68, 72-78, 83-88, 115-121, 123-135, 190-200, 214-224, 239-248, 291-299, 305-312, 328-333, 351-362, 1-101, 103-140, 202-263, 286-362, and 189-242 of SEQ ID NO 309; amino acids 4-21, 110-126, 128-134, 139-149, 1-29, 31-62, 65-94, 99-149, and 7-80 of SEQ ID NO 310; amino acids 4-9, 23-29, 37-52, 57-73, 80-98, 101-119, 146-163, 175-181, 198-208, 222-228, 243-249, 258-263, 269-278, 283-298, 309-324, 329-339, 342-353, 356-363, 365-374, 389-395, 397-404, 408-415, 424-429, 432-450, 457-490, 503-524, 526-556, 568-575, 584-592, 596-619, 621-646, 653-673, 675-694, 699-706, 1-104, 121-135, 143-176, 182-274, 281-301, 306-385, 393-502, 505-648, 654-709, 162-186, 309-397, 435-463, and 503-565 of SEQ ID NO 311; amino acids 5-21, 24-49, 51-63, 65-76, 111-117, 133-145, 149-156, 189-197, 217-230, 240-245, 288-295, 297-316, 321-335, 339-346, 369-382, 401-421, 1-89, 106-125, 129-207, 210-230, 255-357, 360-453, 166-220, and 369-473 of SEQ ID NO 312; amino acids 4-11, 22-37, 39-54, 62-70, 78-84, 94-100, 106-111, 1-51, 59-102, and 41-100 of SEQ ID NO 313; amino acids 16-26, 29-46, 48-54, 94-101, 103-110, 117-125, 134-148, 156-180, 190-196, 221-239, 1-35, 61-81, 88-116, 139-205, 207-227, and 43-75 of SEQ ID NO 314; amino acids 5-19, 21-27, 30-35, 40-57, 67-75, 104-114, 121-130, 152-161, 167-175, 187-205, 219-227, 244-250, 1-76, 83-155, 158-191, 218-253, and 15-137 of SEQ ID NO 315; amino acids 15-38, 40-49, 57-66, 68-76, 80-88, 91-109, 117-122, 148-154, 161-169, 195-214, 220-230, 233-241, 263-269, 285-293, 301-312, 324-340, 349-367, 372-386, 398-407, 426-434, 436-443, 446-452, 456-476, 478-498, 510-517, 523-550, 558-565, 589-604, 610-619, 634-639, 659-668, 680-688, 698-704, 732-739, 741-754, 758-767, 783-796, 800-812, 816-826, 842-860, 1-83, 85-115, 136-179, 192-223, 257-360, 375-486, 501-527, 530-618, 626-644, 653-867, 598-632, 690-700, and 772-833 of SEQ ID NO 316; amino acids 4-12, 41-49, 61-66, 111-118, 123-128, 139-144, 159-166, 178-185, 206-214, 236-248, 262-268, 275-293, 297-314, 348-360, 368-399, 1-68, 71-150, 193-226, 230-296, 305-406, 37-125, and 272-341 of SEQ ID NO 317; amino acids 8-15, 18-54, 61-80, 109-114, 143-149, 153-160, 172-185, 188-194, 196-207, 221-230, 238-244, 273-279, 291-297, 305-319, 325-333, 342-362, 17-110, 118-139, 149-238, 247-365, 62-107, and 123-182 of SEQ ID NO 318; amino acids 15-28, 34-59, 105-135, 137-144, 155-184, 187-212, 221-233, 240-260, 267-278, 286-291, 299-315, 319-334, 1-32, 39-55, 76-122, 124-279, 282-337, 50-100, 116-176, and 261-288 of SEQ ID NO 319; amino acids 4-22, 43-56, 71-108, 119-125, 127-138, 146-155, 164-171, 173-181, 190-199, 214-234, 1-36, 57-112, 121-181, 190-241, and 4-108 of SEQ ID NO 320; amino acids 11-19, 24-31, 37-42, 61-71, 85-91, 94-100, 105-115, 123-138, 140-148, 153-161, 164-173, 185-192, 194-202, 212-222, 227-233, 244-250, 276-287, 298-304, 309-315, 319-330, 342-353, 367-374, 387-394, 403-425, 439-445, 514-520, 528-543, 545-553, 569-584, 586-595, 603-621, 8-273, 283-299, 309-346, 367-490, 494-537, 558-632, 17-74, 155-189, 220-302, 418-540, and 550-612 of SEQ ID NO 321; amino acids 4-20, 41-47, 49-56, 68-86, 95-101, 108-121, 123-137, 145-150, 158-178, 187-198, 218-226, 231-237, 240-250, 252-262, 269-282, 287-317, 1-62, 70-209, 217-319, 140-149, 174-233, and 243-300 of SEQ ID NO 322; amino acids 16-21, 29-36, 43-61, 68-84, 89-136, 159-197, 206-216, 224-240, 244-251, 270-286, 292-307, 313-323, 327-332, 339-364, 388-395, 402-409, 423-440, 448-461, 464-476, 1-15, 19-260, 292-312, 314-451, 465-483, 242-272, and 435-457 of SEQ ID NO 323; amino acids 8-28, 30-35, 55-64, 69-79, 87-95, 132-143, 161-177, 186-198, 222-227, 247-258, 266-288, 340-352, 1-40, 44-96, 103-154, 158-177, 181-202, 208-268, 272-355, 158-168, and 286-334 of SEQ ID NO 324; amino acids 5-24, 39-46, 50-64, 79-89, 103-109, 116-133, 137-150, 159-167, 169-177, 184-202, 209-229, 245-254, 272-282, 294-301, 340-356, 368-378, 388-395, 429-444, 450-463, 484-490, 536-545, 547-557, 565-601, 615-627, 648-655, 1-33, 35-108, 118-236, 245-260, 264-324, 329-358, 360-397, 448-485, 492-536, 541-599, 607-669, 162-181, 331-422, 481-534, and 591-669 of SEQ ID NO 325; amino acids 26-55, 58-73, 75-81, 87-96, 131-140, 150-158, 6-151, and 15-96 of SEQ ID NO 326; amino acids 4-9, 43-52, 63-71, 97-104, 117-125, 130-136, 143-161, 167-179, 185-191, 194-201, 205-211, 219-225, 240-245, 247-256, 261-279, 286-301, 323-338, 340-349, 359-370, 390-397, 399-414, 439-473, 485-496, 505-521, 534-561, 566-571, 575-588, 598-606, 623-629, 653-665, 675-680, 683-690, 692-700, 730-755, 769-798, 802-815, 818-826, 852-859, 862-875, 27-88, 90-173, 176-283, 303-404, 421-443, 473-487, 507-540, 544-642, 645-673, 677-761, 767-840, 843-878, 24-123, 243-316, 430-472, and 512-571 of SEQ ID NO 327; amino acids 40-55, 59-119, 145-180, 182-210, 215-230, 264-274, 293-305, 308-314, 316-328, 339-346, 348-354, 388-393, 395-414, 416-425, 431-436, 442-451, 467-473, 477-487, 491-498, 505-513, 519-542, 548-565, 1-336, 344-379, 395-438, 440-457, 476-571, 230-331, and 454-460 of SEQ ID NO 328; amino acids 5-24, 32-46, 72-77, 83-98, 100-106, 113-135, 140-150, 154-170, 176-199, 218-240, 259-278, 282-301, 307-323, 379-386, 389-430, 449-457, 465-484, 504-520, 537-561, 568-581, 1-321, 323-344, 353-371, 374-588, 341-374, and 406-416 of SEQ ID NO 329; amino acids 11-20, 27-37, 39-54, 67-73, 79-89, 92-102, 112-120, 125-138, 145-152, 172-178, 181-191, 193-204, 213-220, 222-235, 241-257, 281-288, 298-306, 331-359, 361-403, 420-426, 434-456, 462-470, 477-484, 497-504, 520-527, 535-548, 566-575, 584-592, 606-613, 624-629, 635-651, 654-660, 683-694, 697-703, 714-725, 728-757, 767-779, 787-794, 801-814, 834-843, 858-867, 869-875, 888-899, 912-933, 936-946, 3-31, 36-63, 66-80, 103-208, 231-299, 307-399, 445-517, 528-586, 597-618, 632-652, 661-742, 745-781, 785-852, 855-893, 909-947, 293-326, 691-787, and 896-950 of SEQ ID NO 330; amino acids 4-21, 29-46, 61-77, 81-88, 1-88, and 24-78 of SEQ ID NO 331; amino acids 8-41, 48-53, 73-78, 81-98, 115-140, 143-149, 154-162, 182-196, 207-215, 221-226, 230-239, 257-264, 268-276, 287-303, 1-49, 69-149, 161-227, 230-306, 39-67, and 77-105 of SEQ ID NO 332; amino acids 4-11, 16-23, 31-39, 64-79, 82-89, 98-105, 111-117, 136-146, 162-168, 186-193, 196-205, 219-236, 268-287, 289-300, 308-314, 323-339, 349-365, 368-374, 1-51, 93-245, 259-377, 3-9, 107-183, and 210-318 of SEQ ID NO 333; amino acids 4-28, 35-48, 56-64, 91-125, 135-143, 150-159, 1-26, 54-136, 144-167, and 14-88 of SEQ ID NO 334; amino acids 4-16, 21-39, 53-83, 88-93, 99-133, 152-164, 167-187, 192-209, 211-231, 245-273, 278-284, 289-304, 317-333, 335-341, 346-353, 359-366, 378-389, 394-402, 424-438, 447-460, 473-480, 482-492, 494-500, 506-520, 523-541, 558-574, 577-588, 598-605, 611-619, 622-629, 633-643, 649-669, 685-701, 707-727, 735-749, 768-780, 783-789, 798-810, 1-153, 178-240, 254-282, 284-349, 366-446, 450-784, 794-813, 79-169, 194-251, and 451-509 of SEQ ID NO 335; amino acids 4-30, 38-46, 56-70, 80-90, 101-110, 117-123, 149-157, 162-172, 178-191, 211-218, 230-256, 261-283, 292-310, 335-344, 348-354, 361-369, 382-396, 403-414, 425-431, 452-458, 460-472, 484-504, 508-514, 524-541, 562-580, 597-603, 627-643, 645-657, 688-696, 707-713, 719-736, 746-759, 769-775, 791-797, 802-812, 824-830, 838-847, 856-864, 880-901, 909-916, 1-52, 64-78, 81-202, 221-297, 335-381, 384-454, 464-552, 559-590, 598-620, 622-644, 646-668, 672-821, 833-898, 25-108, and 505-560 of SEQ ID NO 336; amino acids 16-24, 37-46, 60-73, 79-90, 97-116, 130-141, 143-150, 155-161, 179-186, 193-206, 212-225, 230-253, 258-267, 290-296, 306-344, 366-381, 383-390, 398-405, 418-425, 438-449, 465-482, 489-499, 503-509, 530-543, 545-567, 7-44, 51-79, 81-114, 116-263, 285-307, 311-351, 379-416, 427-482, 491-509, 535-570, 126-230, 248-286, 364-508, and 510-517 of SEQ ID NO 337; amino acids 4-10, 13-21, 27-40, 90-95, 121-128, 197-203, 239-246, 253-259, 305-311, 322-336, 349-356, 358-364, 372-379, 393-408, 411-417, 427-434, 457-467, 481-490, 492-497, 504-513, 533-542, 561-571, 592-600, 641-646, 661-667, 671-682, 711-720, 722-734, 763-771, 779-796, 833-838, 855-865, 873-879, 886-896, 901-908, 913-924, 931-939, 1-19, 24-55, 88-108, 118-153, 172-190, 198-281, 299-361, 369-392, 430-578, 661-689, 698-738, 795-850, 861-901, 904-924, 927-946, 37-262, 272-351, 453-474, 499-518, 527-547, 569-643, and 897-954 of SEQ ID NO 338; amino acids 22-28, 39-49, 4-20, 26-44, and 5-65 of SEQ ID NO 339; amino acids 4-39, 52-63, 70-88, 97-112, 1-88, 94-125, and 56-113 of SEQ ID NO 340; amino acids 10-29, 35-40, 46-62, 77-84, 94-129, 146-153, 158-164, 166-174, 196-202, 209-215, 225-240, 250-258, 272-287, 305-313, 318-335, 339-353, 362-381, 384-390, 395-424, 439-452, 454-463, 467-476, 482-496, 504-529, 535-562, 564-573, 576-588, 596-602, 604-619, 625-658, 664-675, 685-696, 714-727, 746-758, 770-777, 780-789, 793-799, 845-861, 863-873, 890-901, 905-910, 921-934, 1-30, 35-106, 117-348, 357-381, 390-551, 553-800, 804-835, 844-882, 893-937, 231-286, 394-429, and 686-758 of SEQ ID NO 341; amino acids 8-31, 35-70, 83-89, 91-102, 108-116, 130-156, 169-191, 203-217, 238-256, 270-292, 298-311, 315-331, 335-345, 364-370, 376-382, 384-401, 405-419, 421-430, 434-441, 445-452, 467-481, 503-511, 516-522, 524-531, 534-539, 547-560, 570-582, 5-104, 122-260, 271-340, 353-564, 566-603, 106-129, 215-224, and 454-522 of SEQ ID NO 342; amino acids 8-27, 29-37, 42-49, 63-69, 74-80, 95-118, 140-148, 156-170, 189-195, 197-209, 218-223, 227-235, 247-255, 268-275, 294-299, 305-313, 316-333, 347-359, 369-376, 381-386, 399-410, 423-432, 436-455, 462-475, 524-537, 578-588, 597-605, 616-622, 624-634, 636-644, 648-655, 657-665, 693-698, 706-723, 726-732, 736-778, 782-805, 820-832, 835-846, 848-870, 882-909, 927-933, 951-957, 962-971, 976-982, 986-1001, 1016-1021, 1042-1050, 1054-1061, 1066-1075, 1-68, 84-100, 152-182, 198-344, 348-413, 416-552, 558-621, 624-788, 800-892, 958-1060, 1064-1078, 155-209, 427-501, 658-688, 809-841, 862-871, and 927-1010 of SEQ ID NO 343; amino acids 15-36, 55-67, 70-76, 81-88, 110-125, 128-134, 136-188, 197-214, 216-223, 244-250, 257-263, 265-280, 300-306, 311-319, 2-36, 52-72, 82-152, 156-188, 191-225, 232-322, 21-78, 90-154, and 168-215 of SEQ ID NO 344; amino acids 4-25, 32-41, 51-58, 71-78, 81-89, 101-123, 130-138, 140-151, 165-171, 176-193, 202-214, 244-259, 266-282, 285-293, 295-301, 316-325, 329-334, 344-350, 381-390, 405-415, 423-431, 1-120, 126-160, 173-257, 266-313, 322-342, 354-434, 8-56, and 181-269 of SEQ ID NO 345; amino acids 4-46, 53-60, 74-86, 97-104, 121-128, 149-160, 206-217, 252-258, 274-280, 287-294, 311-327, 356-370, 378-383, 394-403, 425-432, 434-447, 473-484, 491-502, 543-556, 599-608, 610-623, 641-657, 671-684, 698-707, 719-733, 748-758, 772-779, 798-808, 814-820, 830-843, 854-866, 872-884, 891-899, 901-907, 920-932, 1-91, 114-128, 130-149, 156-190, 207-306, 308-330, 342-429, 436-450, 454-662, 666-937, 103-238, 247-273, 451-470, 687-734, and 753-796 of SEQ ID NO 346; amino acids 35-41, 52-58, 66-74, 78-87, 92-99, 101-109, 120-132, 153-164, 176-182, 186-194, 208-238, 246-262, 272-284, 291-311, 317-322, 328-343, 4-104, 112-131, 150-214, 216-345, 36-58, and 282-336 of SEQ ID NO 347; amino acids 5-27, 29-42, 57-71, 73-80, 92-99, 101-107, 126-136, 142-151, 155-163, 173-179, 214-232, 235-254, 262-274, 297-309, 311-323, 330-358, 362-379, 383-394, 396-416, 432-457, 464-472, 474-485, 487-498, 511-519, 527-536, 1-35, 53-118, 123-280, 283-440, 442-542, and 22-120 of SEQ ID NO 348; amino acids 4-15, 27-61, 64-77, 84-97, 102-122, 144-215, 223-239, 242-252, 257-263, 271-286, 295-302, 312-324, 328-348, 380-400, 403-411, 417-428, 434-440, 444-451, 453-467, 485-496, 522-538, 540-545, 552-560, 566-577, 582-588, 1-149, 151-408, 442-594, and 324-391 of SEQ ID NO 349; amino acids 21-41, 43-123, 125-137, 139-157, 171-190, 193-203, 205-226, 242-256, 264-274, 289-299, 301-311, 323-368, 375-396, 400-408, 418-434, 1-437, 84-149, 163-176, and 260-321 of SEQ ID NO 350; amino acids 4-11, 19-34, 44-65, 70-115, 130-140, 142-168, 170-176, 185-206, 221-227, 1-65, 81-124, 127-206, 215-232, and 157-215 of SEQ ID NO 351; amino acids 4-19, 44-51, 66-104, 122-129, 136-141, 143-150, 154-159, 166-173, 181-205, 207-218, 1-15, 21-119, 123-213, and 77-182 of SEQ ID NO 352; amino acids 4-15, 17-34, 40-51, 61-71, 84-89, 137-146, 153-159, 163-170, 175-191, 203-210, 216-228, 242-250, 259-271, 279-284, 291-329, 333-372, 376-394, 399-404, 406-412, 416-424, 446-451, 1-76, 82-168, 179-209, 227-249, 253-473, and 234-319 of SEQ ID NO 353; amino acids 8-15, 17-26, 30-45, 47-74, 80-92, 94-111, 114-120, 124-133, 148-173, 175-181, 183-196, 198-208, 212-231, 238-244, 248-262, 266-285, 290-302, 308-317, 327-332, 334-341, 346-355, 357-365, 373-380, 1-47, 68-99, 104-174, 178-378, and 135-280 of SEQ ID NO 354; amino acids 12-28, 32-56, 61-72, 74-89, 95-128, 130-144, 150-163, 177-189, 196-214, 218-282, 294-305, 313-382, 384-398, 404-420, 426-454, 456-461, 1-224, 229-283, 296-464, and 350-406 of SEQ ID NO 355; amino acids 6-17, 22-31, 35-63, 67-85, 89-101, 128-147, 149-155, 161-170, 172-179, 187-198, 228-234, 240-247, 284-291, 298-308, 326-337, 344-350, 357-366, 1-28, 30-82, 86-267, 271-307, 310-376, 5-136, and 172-260 of SEQ ID NO 356; amino acids 9-32, 36-52, 72-90, 149-157, 165-177, 188-196, 223-233, 237-245, 264-273, 280-293, 298-307, 309-348, 352-362, 366-374, 381-396, 405-413, 416-421, 428-435, 438-444, 449-457, 464-476, 491-555, 579-597, 602-628, 646-652, 663-670, 674-692, 739-747, 762-771, 779-789, 809-816, 1-40, 49-69, 72-92, 97-265, 271-369, 373-452, 456-476, 496-527, 535-555, 567-637, 652-819, 297-327, 539-627, and 712-776 of SEQ ID NO 357; amino acids 5-16, 21-27, 39-46, 60-77, 92-104, 112-118, 129-136, 141-164, 167-176, 178-214, 220-228, 234-251, 284-301, 303-310, 315-328, 336-353, 362-375, 380-390, 393-409, 411-417, 430-438, 448-459, 461-468, 1-15, 53-86, 89-225, 237-320, 331-398, 406-467, 107-184, and 256-311 of SEQ ID NO 358; amino acids 13-34, 36-42, 49-62, 86-92, 124-130, 132-145, 1-38, 41-140, and 4-89 of SEQ ID NO 359; amino acids 16-22, 45-51, 80-85, 88-108, 115-127, 139-157, 160-176, 184-189, 198-204, 227-234, 249-270, 277-295, 314-325, 331-337, 344-367, 397-424, 432-500, 512-521, 524-530, 555-563, 569-583, 586-617, 622-653, 661-673, 679-696, 710-738, 754-759, 764-786, 793-808, 813-820, 831-837, 844-850, 864-889, 891-899, 912-926, 961-970, 975-982, 1016-1024, 1027-1034, 1051-1059, 1096-1102, 1134-1147, 1158-1177, 1179-1185, 1188-1215, 1235-1250, 1271-1284, 1308-1315, 1-34, 79-113, 129-325, 327-360, 363-383, 385-514, 530-565, 577-701, 704-941, 944-981, 985-1005, 1012-1032, 1049-1088, 1097-1183, 1188-1320, 108-194, 370-410, 411-442, 956-1046, and 1055-1236 of SEQ ID NO 360; amino acids 20-32, 67-73, 84-91, 102-108, 148-163, 198-209, 232-237, 7-94, 98-116, 121-196, 205-224, 240-254, 113-132, and 167-245 of SEQ ID NO 361; amino acids 7-16, 36-43, 69-77, 101-114, 136-150, 155-161, 183-195, 197-206, 210-218, 225-237, 1-77, 97-156, 172-215, 221-240, and 92-164 of SEQ ID NO 362; amino acids 17-23, 52-62, 75-87, 107-112, 120-135, 140-146, 170-176, 188-206, 210-220, 228-255, 273-282, 304-314, 324-331, 344-355, 363-370, 2-35, 81-179, 181-264, 267-288, 292-376, 2-126, and 245-300 of SEQ ID NO 363; amino acids 4-9, 11-17, 24-85, 89-103, 114-119, 126-135, 151-158, 169-175, 191-203, 226-237, 247-256, 261-266, 278-283, 306-316, 321-331, 333-340, 350-358, 361-392, 397-408, 412-419, 1-113, 117-183, 186-275, 294-362, 370-448, 468-485, 63-136, 248-305, and 458-466 of SEQ ID NO 364; amino acids 4-23, 41-47, 52-59, 62-75, 86-92, 98-104, 106-112, 126-143, 152-157, 160-166, 183-192, 196-201, 207-214, 227-235, 238-245, 248-265, 276-285, 304-314, 324-342, 350-356, 360-375, 390-403, 411-435, 437-446, 453-461, 1-39, 43-79, 88-160, 165-236, 241-426, 434-470, 132-199, and 214-286 of SEQ ID NO 365; amino acids 8-31, 35-48, 75-98, 100-106, 128-134, 151-166, 168-177, 202-223, 252-257, 265-277, 288-302, 306-316, 371-377, 385-396, 408-413, 429-445, 472-480, 1-331, 352-386, 404-488, 80-156, and 237-303 of SEQ ID NO 366; amino acids 4-10, 22-32, 39-46, 52-69, 90-96, 104-117, 126-142, 148-161, 163-174, 178-195, 200-210, 216-222, 225-236, 238-246, 248-265, 279-285, 313-322, 324-336, 1-203, 205-339, 31-111, and 205-228 of SEQ ID NO 367; amino acids 6-26, 33-63, 66-74, 125-148, 153-185, 225-230, 234-250, 253-278, 286-299, 312-319, 335-346, 348-361, 383-401, 414-419, 423-430, 432-440, 447-454, 470-478, 488-508, 519-533, 537-554, 16-83, 126-172, 175-210, 245-325, 329-448, 469-557, 81-97, 197-371, and 470-500 of SEQ ID NO 368; amino acids 4-9, 11-32, 44-56, 68-74, 82-98, 104-109, 131-140, 144-164, 176-182, 188-194, 206-212, 219-225, 228-235, 237-244, 254-271, 277-287, 294-302, 312-318, 324-331, 341-350, 352-358, 399-405, 411-419, 438-447, 452-459, 465-470, 475-484, 486-506, 514-523, 525-532, 537-543, 1-73, 112-209, 231-294, 296-314, 326-381, 388-414, 423-457, 462-484, 495-514, 522-544, 547-568, and 495-559 of SEQ ID NO 369; amino acids 4-26, 29-36, 45-52, 57-63, 68-75, 77-88, 93-108, 114-120, 138-143, 148-155, 161-179, 198-211, 214-224, 229-242, 244-253, 268-274, 302-311, 319-331, 335-349, 364-374, 377-384, 388-394, 423-436, 441-446, 452-471, 478-501, 506-514, 522-546, 558-579, 589-604, 623-631, 1-36, 40-114, 125-255, 266-395, 413-511, 530-557, 564-583, 605-640, 54-144, and 543-627 of SEQ ID NO 370; amino acids 5-10, 24-30, 37-53, 62-94, 101-111, 118-125, 145-151, 156-162, 164-186, 191-198, 204-212, 224-233, 244-253, 263-269, 277-297, 304-322, 334-341, 355-372, 379-384, 393-406, 412-425, 427-435, 437-449, 461-471, 483-506, 515-527, 535-543, 546-559, 562-570, 576-584, 588-601, 640-647, 651-673, 681-689, 712-734, 1-63, 73-369, 371-428, 432-454, 457-567, 573-635, 655-698, 707-744, 600-685, and 741-753 of SEQ ID NO 371; amino acids 13-19, 27-38, 78-87, 105-129, 134-142, 151-179, 184-197, 206-214, 225-235, 246-265, 274-314, 322-330, 334-343, 1-47, 49-66, 70-96, 102-285, 287-322, 330-346, 14-57, 76-167, and 191-245 of SEQ ID NO 372; amino acids 15-21, 26-45, 49-60, 62-69, 77-87, 96-104, 108-114, 117-130, 135-144, 149-160, 174-181, 186-193, 203-218, 228-234, 236-242, 257-264, 285-326, 332-342, 344-349, 353-370, 373-425, 428-437, 447-457, 472-483, 490-505, 516-526, 546-554, 556-570, 572-585, 601-609, 613-624, 626-640, 647-663, 665-671, 678-689, 691-697, 707-719, 721-751, 769-778, 1-64, 73-192, 209-327, 329-418, 421-529, 534-586, 599-646, 650-682, 703-793, 86-169, 318-384, 502-520, and 529-602 of SEQ ID NO 373; amino acids 4-10, 19-26, 28-34, 41-60, 62-81, 89-97, 99-115, 143-156, 162-181, 186-193, 197-207, 225-231, 233-240, 254-266, 283-296, 309-323, 325-338, 341-352, 363-373, 388-413, 420-426, 1-37, 41-119, 133-251, 255-277, 291-355, 359-411, 93-182, and 360-391 of SEQ ID NO 374; amino acids 5-37, 48-77, 82-89, 91-102, 119-127, 129-138, 145-179, 186-194, 197-203, 205-212, 219-235, 243-250, 273-289, 294-304, 309-349, 352-363, 377-388, 391-399, 407-415, 418-443, 449-463, 471-477, 479-494, 496-503, 2-44, 85-108, 127-242, 245-259, 271-288, 291-329, 339-433, 443-457, 468-517, 34-88, 104-164, 168-227, 235-259, 279-301, and 345-377 of SEQ ID NO 375; amino acids 4-24, 32-39, 44-51, 60-70, 86-96, 98-105, 108-117, 122-138, 142-156, 167-181, 192-212, 214-223, 231-240, 254-278, 15-131, 139-285, 9-96, and 181-194 of SEQ ID NO 376; amino acids 12-31, 41-47, 50-73, 86-99, 103-109, 141-147, 152-167, 180-195, 201-214, 216-237, 240-246, 251-265, 275-281, 289-294, 301-314, 320-333, 342-349, 351-361, 367-389, 402-408, 426-435, 459-469, 9-27, 31-92, 94-134, 147-199, 202-268, 271-291, 303-333, 336-465, 480-498, and 72-139 of SEQ ID NO 377; amino acids 23-34, 41-52, 74-86, 92-99, 107-121, 123-130, 154-159, 162-169, 193-227, 229-243, 249-255, 260-269, 17-154, 183-272, and 137-270 of SEQ ID NO 378; amino acids 4-29, 81-88, 106-128, 177-200, 207-214, 221-234, 240-250, 255-277, 279-285, 291-324, 326-347, 349-362, 376-392, 400-412, 415-423, 425-440, 444-449, 453-460, 1-52, 60-99, 102-161, 166-189, 203-294, 312-429, 436-468, 487-512, and 419-508 of SEQ ID NO 379; amino acids 4-11, 42-49, 51-68, 91-97, 111-122, 130-142, 156-178, 186-230, 247-252, 278-297, 303-331, 337-344, 355-360, 383-391, 415-421, 439-444, 452-463, 468-481, 516-524, 537-542, 558-570, 576-582, 590-597, 621-633, 655-661, 667-673, 680-688, 728-734, 764-771, 776-789, 803-810, 825-841, 844-853, 877-891, 893-907, 924-933, 947-960, 966-974, 984-989, 998-1011, 1018-1024, 1028-1034, 1044-1053, 1084-1093, 1104-1110, 1114-1121, 1146-1154, 1166-1173, 1189-1196, 1202-1210, 1212-1218, 1220-1228, 1243-1248, 2-25, 30-82, 95-287, 304-370, 444-491, 507-662, 677-698, 704-746, 763-811, 818-920, 926-970, 989-1127, 1130-1198, 1203-1239, 200-260, 562-610, 815-858, 892-903, 961-1060, and 1065-1073 of SEQ ID NO 380; amino acids 25-41, 50-56, 58-70, 101-111, 118-126, 138-147, 161-168, 242-252, 271-291, 320-329, 336-342, 353-364, 369-375, 383-389, 418-432, 473-484, 499-514, 520-532, 537-545, 548-560, 567-575, 588-606, 612-622, 628-634, 647-658, 666-673, 686-693, 700-706, 714-720, 734-744, 754-759, 786-798, 820-827, 852-859, 864-885, 892-899, 908-915, 921-933, 941-946, 950-957, 1-52, 55-157, 189-250, 269-311, 358-576, 582-774, 783-837, 855-924, 930-961, 75-155, 197-242, 257-412, 457-547, 715-788, and 874-936 of SEQ ID NO 381; amino acids 29-36, 49-55, 92-100, 109-116, 127-135, 140-148, 153-158, 169-176, 179-191, 214-221, 227-237, 240-246, 1-43, 55-73, 108-155, 164-249, and 20-87 of SEQ ID NO 382; amino acids 5-19, 30-41, 44-49, 64-70, 72-80, 82-88, 95-100, 115-120, 141-163, 1-39, 57-119, 131-166, and 15-83 of SEQ ID NO 383; amino acids 18-53, 64-75, 91-98, 103-109, 112-119, 154-167, 173-181, 200-208, 226-241, 261-268, 283-289, 294-309, 344-371, 374-382, 388-398, 416-423, 425-439, 442-453, 456-472, 491-497, 502-513, 515-524, 527-542, 547-562, 599-608, 610-620, 623-632, 636-656, 666-675, 683-692, 697-703, 709-716, 747-769, 778-785, 792-805, 829-836, 863-870, 877-905, 913-922, 937-950, 952-985, 991-999, 1-110, 114-160, 169-189, 216-238, 244-364, 378-409, 422-446, 453-475, 487-570, 590-640, 643-713, 722-809, 816-952, 969-1017, 155-173, 239-280, 501-575, 689-727, 766-789, and 826-880 of SEQ ID NO 384; amino acids 29-35, 40-64, 66-75, 115-122, 141-173, 179-187, 199-206, 209-215, 234-240, 244-251, 259-272, 297-303, 319-325, 332-348, 358-368, 372-382, 388-397, 399-405, 431-439, 446-454, 43-130, 136-211, 242-297, 314-333, 338-387, 396-416, 422-459, 19-144, 219-359, and 438-452 of SEQ ID NO 385; amino acids 4-23, 30-35, 77-84, 92-97, 105-113, 115-120, 131-137, 140-151, 200-211, 226-239, 241-247, 255-261, 271-278, 304-309, 395-400, 429-435, 443-453, 478-493, 521-530, 535-553, 563-568, 571-581, 623-628, 660-667, 693-700, 1-28, 74-140, 151-185, 194-218, 225-298, 300-355, 358-443, 445-463, 468-553, 567-595, 597-621, 631-676, 681-699, 16-72, 526-619, and 625-694 of SEQ ID NO 386; amino acids 4-18, 26-42, 58-79, 83-89, 99-108, 110-118, 125-140, 143-156, 168-175, 177-189, 211-227, 262-273, 281-291, 356-363, 383-402, 464-472, 1-49, 59-247, 251-321, 338-404, 410-430, 438-493, and 244-462 of SEQ ID NO 387; amino acids 6-28, 57-65, 72-81, 87-99, 1-43, 46-68, 83-104, and 13-105 of SEQ ID NO 388; amino acids 4-12, 32-55, 67-81, 92-100, 119-126, 143-151, 153-163, 182-188, 201-210, 238-244, 250-256, 278-283, 290-296, 303-308, 312-317, 345-354, 356-367, 378-388, 423-434, 442-449, 458-465, 476-488, 494-501, 510-520, 530-538, 551-563, 570-577, 582-601, 628-635, 700-714, 719-725, 744-752, 761-769, 778-786, 790-796, 821-839, 851-867, 872-878, 920-945, 957-975, 1022-1031, 1038-1047, 1084-1090, 1-91, 102-123, 130-170, 173-290, 307-327, 334-354, 359-396, 416-484, 507-563, 567-590, 600-618, 623-648, 661-686, 692-813, 822-887, 905-984, 994-1076, 1079-1093, 219-278, 280-417, 599-696, and 750-759 of SEQ ID NO 389; amino acids 6-39, 46-61, 67-72, 75-93, 107-116, 129-164, 169-176, 181-189, 226-243, 245-255, 267-274, 277-305, 319-326, 342-363, 375-385, 390-404, 419-428, 439-446, 448-465, 478-488, 507-516, 524-530, 546-555, 1-33, 35-63, 71-209, 217-237, 246-260, 283-313, 317-397, 399-431, 445-476, 479-558, and 151-220 of SEQ ID NO 390; amino acids 5-14, 25-50, 84-91, 99-111, 119-125, 129-144, 188-197, 200-208, 228-234, 243-250, 262-269, 275-282, 294-299, 9-175, 183-302, 104-209, and 229-292 of SEQ ID NO 391; amino acids 8-27, 29-42, 45-62, 1-71, and 8-61 of SEQ ID NO 392; amino acids 13-39, 41-47, 56-75, 78-87, 100-107, 121-127, 146-157, 164-171, 173-183, 201-207, 210-216, 221-231, 244-252, 255-263, 281-289, 291-309, 348-374, 390-401, 424-433, 435-445, 458-474, 509-530, 534-545, 548-565, 582-591, 597-602, 605-620, 622-628, 663-672, 686-691, 699-711, 728-742, 745-758, 773-786, 3-118, 120-171, 183-290, 293-313, 316-343, 345-367, 373-555, 561-651, 655-730, 737-773, 261-330, 337-365, and 587-709 of SEQ ID NO 393; amino acids 4-25, 41-54, 92-98, 104-111, 122-131, 144-151, 154-160, 200-207, 215-233, 243-253, 259-270, 278-297, 299-310, 328-337, 345-352, 373-389, 398-405, 419-425, 438-447, 472-479, 483-489, 492-501, 505-519, 531-546, 550-555, 568-574, 581-589, 595-600, 622-631, 683-689, 714-725, 733-738, 747-759, 761-766, 772-779, 795-801, 814-821, 856-868, 899-907, 923-929, 931-937, 1-30, 37-57, 64-86, 93-191, 193-217, 231-277, 296-361, 365-394, 398-529, 534-735, 742-785, 788-912, 506-517, and 532-590 of SEQ ID NO 394; amino acids 4-10, 16-25, 31-59, 66-75, 90-99, 102-107, 136-149, 151-159, 185-202, 204-215, 224-237, 240-248, 254-262, 272-278, 310-316, 337-349, 390-396, 400-409, 420-429, 478-484, 502-517, 533-539, 570-584, 614-621, 625-634, 645-654, 662-672, 677-686, 719-733, 747-753, 762-772, 782-792, 802-811, 820-826, 832-841, 856-862, 912-918, 931-937, 964-970, 989-994, 1006-1011, 1017-1023, 1036-1043, 1053-1064, 1071-1077, 1082-1090, 1103-1109, 1128-1135, 1137-1143, 1156-1165, 1169-1174, 1197-1204, 1213-1222, 1255-1273, 1305-1311, 1315-1322, 1340-1346, 1352-1359, 1386-1393, 1403-1412, 1441-1447, 1459-1468, 1470-1479, 1493-1500, 1511-1520, 1525-1537, 1544-1557, 1564-1569, 1580-1585, 1591-1596, 1627-1633, 1642-1656, 1690-1697, 1707-1713, 1715-1721, 1751-1761, 1773-1781, 1791-1796, 1804-1810, 1846-1851, 1860-1870, 1876-1882, 1910-1917, 1947-1953, 1962-1970, 2008-2019, 2026-2036, 2043-2051, 2085-2090, 2105-2115, 2132-2142, 1-30, 32-88, 143-330, 337-359, 379-434, 480-583, 604-715, 719-736, 744-761, 768-800, 805-850, 874-889, 898-948, 961-1053, 1058-1110, 1135-1150, 1157-1183, 1189-1230, 1235-1255, 1259-1277, 1308-1377, 1383-1422, 1428-1450, 1453-1472, 1474-1501, 1507-1591, 1596-1660, 1669-1703, 1709-1767, 1788-1848, 1861-1876, 1922-1941, 1944-1979, 1998-2061, 2069-2102, 2115-2136, 60-298, 308-571, 616-842, 971-1120, 1126-1252, 1359-1652, 1688-1980, and 2051-2106 of SEQ ID NO 395; amino acids 17-25, 29-38, 41-60, 97-105, 111-117, 124-159, 172-181, 186-192, 200-207, 212-229, 241-257, 267-298, 305-314, 316-322, 335-341, 345-355, 357-364, 367-375, 377-382, 387-400, 407-413, 417-428, 437-443, 448-454, 456-463, 469-477, 483-489, 495-508, 513-524, 540-551, 585-602, 1-98, 108-194, 205-473, 490-510, 517-557, 559-615, and 16-287 of SEQ ID NO 396; amino acids 10-33, 35-41, 50-55, 60-73, 81-90, 106-114, 121-136, 147-158, 179-191, 212-219, 229-236, 266-275, 285-307, 312-318, 334-345, 351-359, 361-366, 373-390, 398-419, 450-464, 475-483, 495-506, 524-530, 534-546, 555-565, 572-583, 596-603, 623-640, 658-664, 675-685, 690-696, 702-711, 714-723, 742-748, 765-772, 783-790, 811-823, 835-842, 848-854, 874-881, 1-31, 33-74, 85-118, 138-158, 165-184, 204-359, 375-402, 408-478, 491-511, 531-640, 653-745, 756-861, 871-889, 34-89, 124-209, 227-245, 271-338, 402-453, and 496-596 of SEQ ID NO 397; amino acids 19-31, 39-48, 50-61, 70-76, 85-96, 98-106, 114-127, 129-159, 166-184, 195-210, 215-224, 234-240, 247-254, 259-265, 267-284, 286-295, 297-307, 310-318, 320-330, 340-347, 1-32, 34-74, 93-115, 134-190, 192-255, 266-339, 119-185, and 241-349 of SEQ ID NO 398; amino acids 16-31, 45-52, 62-68, 89-149, 154-164, 175-185, 187-193, 195-207, 222-230, 253-279, 287-295, 299-323, 1-62, 85-154, 172-222, 224-248, 252-328, 188-255, and 319-334 of SEQ ID NO 399; amino acids 7-15, 38-65, 67-76, 80-103, 123-139, 146-152, 181-188, 196-206, 223-229, 234-245, 259-267, 285-296, 323-333, 340-358, 387-393, 401-409, 417-427, 431-439, 441-450, 472-477, 483-496, 508-524, 591-598, 602-610, 616-624, 627-641, 655-664, 666-679, 687-694, 696-709, 714-726, 759-766, 768-778, 782-793, 804-810, 1-105, 115-293, 300-342, 344-418, 432-562, 567-598, 613-656, 670-713, 757-803, and 23-98 of SEQ ID NO 400; amino acids 9-18, 35-57, 65-74, 82-87, 92-98, 105-117, 128-136, 147-154, 157-165, 181-187, 189-218, 224-232, 2-174, 176-241, and 26-112 of SEQ ID NO 401; amino acids 4-13, 24-35, 49-56, 71-77, 81-98, 103-109, 134-150, 158-169, 176-186, 188-195, 222-229, 249-262, 273-282, 335-341, 358-366, 375-395, 415-423, 431-448, 468-477, 486-492, 500-517, 526-539, 553-558, 563-571, 573-579, 581-603, 606-641, 649-657, 659-669, 1-40, 46-117, 127-171, 186-201, 203-318, 332-352, 356-390, 411-543, 560-669, 13-84, and 395-470 of SEQ ID NO 402; amino acids 43-56, 95-108, 139-145, 158-178, 186-199, 204-216, 224-231, 234-247, 251-275, 282-290, 303-309, 312-329, 331-341, 349-355, 379-405, 410-416, 429-436, 452-457, 463-474, 476-483, 485-491, 507-531, 546-563, 573-585, 628-635, 663-669, 687-700, 718-725, 731-742, 758-769, 788-795, 800-811, 824-831, 841-852, 859-865, 869-881, 885-891, 896-904, 941-951, 955-972, 1-91, 93-195, 199-284, 324-357, 385-405, 409-499, 506-604, 621-678, 688-749, 753-806, 815-882, 887-927, 933-953, 30-60, 107-144, 235-255, 439-492, 620-673, 767-814, and 864-969 of SEQ ID NO 403; amino acids 6-31, 59-73, 76-87, 98-104, 107-118, 126-145, 156-165, 168-177, 185-193, 206-214, 217-237, 245-252, 256-276, 288-304, 314-331, 333-340, 366-378, 387-406, 409-423, 428-437, 457-463, 480-488, 509-519, 536-542, 550-563, 571-593, 606-612, 6-51, 54-151, 161-194, 203-357, 361-474, 477-497, 501-538, 541-615, and 319-382 of SEQ ID NO 404; amino acids 6-12, 17-31, 33-48, 1-53, and 2-60 of SEQ ID NO 405; amino acids 54-61, 64-86, 91-109, 111-120, 127-133, 135-143, 147-152, 166-176, 179-186, 189-207, 212-220, 226-231, 235-242, 250-267, 271-279, 294-308, 316-336, 347-353, 362-368, 380-389, 391-398, 406-418, 441-463, 471-500, 503-522, 524-560, 562-570, 572-582, 584-590, 634-639, 643-652, 657-663, 666-673, 697-707, 714-721, 727-734, 743-751, 758-776, 796-806, 852-867, 870-896, 898-905, 923-945, 948-955, 957-962, 964-969, 982-988, 1000-1006, 1008-1014, 1030-1042, 1056-1068, 1075-1086, 2-97, 111-196, 209-321, 327-349, 353-367, 377-408, 418-491, 500-664, 691-772, 788-1019, 1024-1049, 1054-1077, 1079-1095, 29-54, 261-267, and 635-691 of SEQ ID NO 406; amino acids 4-16, 18-41, 47-54, 106-113, 120-131, 144-150, 165-171, 192-202, 220-227, 229-239, 245-259, 314-327, 358-365, 377-384, 396-402, 414-430, 436-442, 457-466, 474-480, 498-519, 524-531, 535-541, 564-569, 581-597, 622-628, 653-676, 681-686, 719-727, 1-139, 145-180, 186-261, 271-291, 308-328, 332-365, 372-394, 400-440, 453-530, 533-585, 588-631, 639-687, 695-746, 118-193, 209-355, and 505-657 of SEQ ID NO 407; amino acids 6-27, 50-56, 62-72, 80-86, 98-111, 118-127, 138-168, 176-184, 189-201, 205-245, 256-263, 1-44, 46-115, 132-192, 222-242, 246-264, 161-212, and 218-247 of SEQ ID NO 408; amino acids 6-28, 32-41, 46-66, 74-84, 92-108, 110-117, 137-146, 152-170, 173-200, 226-264, 266-275, 284-301, 308-313, 316-335, 355-364, 374-388, 394-404, 406-416, 424-431, 437-452, 456-477, 1-49, 51-166, 170-203, 208-368, 382-486, 489-507, 5-82, 101-118, and 260-376 of SEQ ID NO 409; amino acids 4-13, 16-26, 28-34, 39-45, 47-63, 68-121, 130-145, 150-162, 165-171, 176-203, 215-240, 242-249, 251-261, 282-290, 293-309, 316-322, 334-352, 360-367, 397-410, 412-422, 430-439, 1-67, 73-274, 288-429, 434-465, 119-189, 200-246, and 399-436 of SEQ ID NO 410; amino acids 4-12, 15-22, 25-34, 36-47, 54-79, 92-99, 106-114, 129-136, 150-160, 168-184, 186-215, 222-229, 239-249, 286-293, 299-314, 322-327, 333-358, 371-378, 387-406, 413-422, 435-443, 448-455, 461-471, 474-480, 489-495, 1-42, 57-82, 87-123, 127-498, and 30-110 of SEQ ID NO 411; amino acids 4-29, 42-68, 70-79, 1-52, 57-80, and 15-86 of SEQ ID NO 412; amino acids 8-51, 78-86, 94-99, 107-113, 140-148, 156-162, 173-181, 189-197, 213-229, 264-270, 274-281, 283-293, 308-321, 347-360, 399-411, 425-436, 442-449, 466-482, 486-498, 516-521, 527-534, 557-565, 586-594, 604-617, 622-630, 652-674, 720-731, 742-754, 773-783, 1-129, 131-247, 263-335, 343-364, 370-639, 652-697, 712-779, 187-241, 319-394, 411-485, and 657-679 of SEQ ID NO 413; amino acids 7-14, 36-46, 48-57, 74-81, 85-108, 113-131, 141-154, 168-179, 16-67, 69-91, 96-134, 137-177, and 48-105 of SEQ ID NO 414; amino acids 4-20, 28-33, 39-55, 57-65, 68-82, 84-92, 117-123, 1-85, 92-148, and 15-142 of SEQ ID NO 415; amino acids 4-9, 17-23, 37-53, 71-89, 104-116, 123-128, 133-138, 145-170, 173-205, 213-232, 234-252, 260-268, 275-280, 287-311, 316-345, 357-364, 1-18, 37-57, 68-278, 306-400, 7-100, and 152-243 of SEQ ID NO 416; amino acids 5-19, 38-45, 77-83, 89-99, 108-119, 125-132, 144-153, 161-171, 180-191, 221-227, 233-243, 274-286, 293-299, 1-27, 44-147, 159-255, 262-280, 288-302, 22-73, and 224-290 of SEQ ID NO 417; amino acids 8-15, 17-39, 48-55, 57-77, 87-95, 99-109, 119-132, 146-152, 171-176, 196-203, 220-229, 231-245, 253-259, 273-285, 293-300, 318-324, 331-344, 367-374, 395-401, 409-414, 434-471, 483-490, 509-517, 519-534, 537-544, 554-574, 584-590, 599-609, 615-625, 632-639, 665-672, 676-686, 688-697, 702-708, 714-720, 730-742, 744-752, 780-786, 790-800, 812-836, 2-17, 28-146, 152-170, 198-214, 235-270, 279-326, 333-368, 381-407, 435-608, 624-650, 656-673, 711-779, 782-799, 809-872, 157-185, and 341-483 of SEQ ID NO 418; amino acids 4-57, 60-67, 80-96, 98-118, 5-114, and 38-112 of SEQ ID NO 419; amino acids 11-34, 43-51, 67-108, 116-138, 151-165, 9-30, 40-168, and 13-78 of SEQ ID NO 420; amino acids 18-24, 40-47, 51-62, 67-74, 87-94, 102-109, 112-121, 141-147, 152-164, 175-198, 200-224, 229-235, 245-260, 262-293, 310-323, 326-349, 390-414, 423-431, 440-447, 456-462, 466-476, 481-493, 497-504, 512-538, 545-550, 560-573, 584-591, 596-602, 607-613, 7-67, 71-131, 134-231, 233-260, 276-340, 342-385, 388-443, 447-475, 509-616, and 504-552 of SEQ ID NO 421; amino acids 11-17, 38-49, 52-58, 67-79, 98-104, 7-106, and 16-107 of SEQ ID NO 422; amino acids 5-17, 32-46, 54-60, 89-102, 112-127, 152-161, 169-178, 186-193, 228-240, 247-256, 259-266, 274-296, 3-38, 55-69, 72-135, 165-301, 22-96, 124-131, 143-172, and 209-275 of SEQ ID NO 423; amino acids 17-26, 32-44, 1-43, and 28-49 of SEQ ID NO 424; amino acids 11-17, 26-32, 72-77, 162-168, 204-211, 218-224, 234-243, 270-276, 287-301, 314-333, 339-345, 360-375, 392-398, 403-409, 419-434, 438-444, 454-468, 473-479, 489-503, 508-514, 524-539, 543-549, 559-574, 578-584, 607-616, 618-628, 664-669, 710-715, 718-730, 734-740, 747-763, 766-772, 774-785, 787-796, 73-125, 133-152, 163-246, 264-330, 337-376, 594-635, 660-680, 693-711, 715-816, 6-428, and 493-608 of SEQ ID NO 425; amino acids 14-29, 32-58, 63-76, 78-86, 89-100, 102-110, 131-140, 148-154, 188-201, 210-219, 230-243, 245-254, 262-281, 298-307, 316-324, 340-352, 373-396, 407-414, 440-453, 456-477, 480-487, 495-508, 515-529, 537-544, 552-560, 564-572, 587-592, 605-619, 625-632, 638-644, 660-674, 684-690, 697-719, 732-738, 1-58, 67-95, 123-168, 176-240, 242-284, 287-317, 325-390, 398-418, 423-499, 510-582, 598-631, 635-683, 692-734, 127-190, 537-604, and 697-727 of SEQ ID NO 426; amino acids 13-27, 38-44, 48-55, 57-69, 72-81, 97-108, 126-141, 152-160, 165-177, 180-186, 197-241, 289-296, 309-328, 334-339, 341-353, 1-106, 125-251, 257-306, 310-356, 42-51, and 97-267 of SEQ ID NO 427; amino acids 4-10, 12-21, 29-35, 44-56, 59-67, 74-86, 91-98, 103-114, 1-124, and 9-86 of SEQ ID NO 428.

20. The antigen according to claim 19, whereby the antigen further consists of
a) 1 to 50 additional amino acid residue(s), preferably 1 to 40, more preferably 1 to 30, even more preferably at most 1 to 25, still more preferably at most 1 to 10, most preferably 1, 2, 3, 4 or 5 additional amino acid residue(s); and/or
b) at least one additional amino acid residue heterologous to the core amino acid sequence.

21. The antigen according to claim 20, wherein the additional amino acid residue(s) is/are flanking the core amino acid sequence N-terminally, C-terminally or N- and C-terminally.

22. The antigen according to claim 19, wherein the antigen comprises at least 2, at least 3, at least 4, at least 5 or at least 6 core amino acid sequences as defined in claim 19.

23. A process for producing an antigen, or an active fragment or an active variant thereof, comprising expressing the nucleic acid molecule as defined in claim 1.

24. (canceled)

25. (canceled)

26. A pharmaceutical composition, preferably a vaccine, comprising an antigen, or an active fragment or an active variant thereof, as defined in claim 11.

27.-30. (canceled)

31. An antigen, or an active fragment or an active variant thereof, as defined in claim 11 for the treatment or prevention of an infection with Moraxella, most preferably Moraxella catarrhalis.

32. (canceled)

33. An antibody, or at least an effective part thereof, which binds to at least a selective part of an antigen or a fragment thereof, preferably an active fragment thereof, or a variant thereof, preferably an active variant thereof, as defined in claim 11.

34.-38. (canceled)

39. A hybridoma cell line, which produces an antibody as defined in claim 33.

40. A method for producing an antibody, characterized by the following steps:
a) initiating an immune response in a non-human animal by administering an antigen, or an active fragment or an active variant thereof, as defined in claim 11, to said animal,
b) removing an antibody containing body fluid from said animal, and
c) producing the antibody by subjecting said antibody containing body fluid to further purification steps.

41. (canceled)

42. A pharmaceutical composition comprising an antibody according to claim 33.

43.-47. (canceled)

48. A method for diagnosing an infection with a Moraxella organism comprising the steps of:
a) contacting a sample obtained from a subject with an antigen, or an active fragment or an active variant thereof, as defined in claim 11; and
b) detecting the presence of an antibody against said Moraxella organism in the sample.

49.-55. (canceled)

56. A method for the treatment of a Moraxella infection in an animal or human preferably in need thereof, comprising the step of administering to said animal or human a therapeutically effective amount of an antigen, or an active fragment or an active variant thereof, as defined in claim 11.

57.-59. (canceled)

The application's sequence listing, which the Patent Office published only in electronic form, follows.

SEQUENCE LISTING (913 sequences)

SEQ ID NO: 1 - DNA, 885 bp, Moraxella catarrhalis
atgaactacaaacatgcctatcatgcaggtaactttgctgatgttgtcaagcacattttattgttacaattattaagccaatttagtgctaaagccaagccattttatgtgcttgatgcctatggcggtcgtggcttgtattcattggcaagcagcgaaacccaaaaaacccaagaagcacagcgaggtgttgttgtgcttgagcaagccgttaaggcaggcttggacggactgccaaacgctgtcagccgatatttatcagacttagcgtttgcccgccaaaaatacgaccaatatgtctatcctggttcaccctggtggattgcccatcatggcgaatatcactctacaaatgcaccactacgagcagaggcatttgaaacggtggcagatgagtatgatgcactcaattatcagctttatcagttgccaatcggcattcatcatcgagatgcctttgagggcgtgcgtgctgttataccacccaaagaaaagcgtggcatcattttattagatccgccatttgaacaagaacataaagactttagccgcttggtagatttattggttagcagccataaaaagtttgcgacagggacttttgttttgtggtatcccattaaaaatattgaggcagttgaattattttataaaaaaatgaaacgcactggtatcaaaaaacaactggtctgcgagttaaatttatatcctaatgatgtcgctgttgggctaaatggaacgggtctattggtcatcaatccaccgtggcaatttgccgataatgcccaagaagtcattgagtttttggcacccattttaaagcccaaagatgcaccccaaatgactcttggtgagatggcagtggttaagtggttggttgcagaa

SEQ ID NO: 2 - DNA, 1458 bp, Moraxella catarrhalis
atgccaaattcaaccaaagtcaaaacgctcccaaaacgcctaatagaaatcccagagatgcgacgcattcaaaacattcattttgttggcattggtggggctggcatgtgtggcattgccgaagtgcttgccaatcaaggctatgtggttactggctcagacattaaggcaaatgcgatgaccgagcgtctagaaaacttaggtgtaacggtacatgttggtcatgatgccagcaacatcaaaatggccgatgtggtggtggtgtcatctgccattgaccgacaaaaccctgagattagggccgccttaaaagcacacattcctgtggtacgccgtgccgacatgttgggtgagctgatgcgataccgtcatggcattgcggtggcaggggctcatggcaagaccacaaccacaagtttattaaccatgatgctcaccgaagcggggcttgacccaacttatgtgattggcggtaaattaaacgcctcaggcaaaaatgccgccttgggtgccagccgttatttggtggcagaagctgatgaatctgatgcgtcttttttatctttgcgacccatggcgtgtgttgttaccaacattgatgaagaccacatggagacctatgaaggcagctttgataaactaaaacaagcctatgtgcagtttttgcacaacatgcctttttatgggctggcggtgttgtgtggcgatgacaaagagctgtatgccatgattgatgacattgcaagacctgtcatcacatatggccttgaaaaacacaacgatgtgcaggcggtagatgtgattgcagacggcacaaaaacccatttcaccgtactaagaaaagacaaaaaacccttacccatcaccttaaatatccctggcattcacaatgtctataatgcccttggggcaattaccatggcaaccgatgaaggcgtgagtgataaagccatttgccaagcggtagaaaaatttgcaggcgtgggcagacgctttgaaaacaatggcagctatcccctaacagatggcagcggtgatgtggtattgattgatgattatgggcatcaccccaccgaaatcgccatgaccatcaaagcggcacgccaaagttatccagaccgccgtttggtgatgatgtttcaaccacaccgttacagtcgcacaagggattgttttagcgagtttgtcaatgtgttatcgcaggtggataagctgattttgcttgatgtgtacagtgctggcgaggagctgattaagggggcaacaagcaatgatttggcgcgttcattgcgtgagcgtgggcaggttgaaccgattgtgttaaatgtcaatgacaaagaacaaatcacccaagtgcttaaaatcaccctaaacgccaatgatttgctgatgacccaaggggcgggcaatgtgggacaactgtgtcaagaattggtcaaaaatgggttgtttttgggg

SEQ ID NO: 3 - DNA, 813 bp, Moraxella catarrhalis
atgtcagataaaaacccaactcaaatctcaatgcgtgacttgttagaagcaggtgctcacttcggtcaccaaactcgtttttggaatccaaaaatgagccagtacatctttggtgctcgtaatcgcattcatattattaaccttgagcataccgttaagcaatttaacgaagcactaactttcgtgaataaacaagcagcggctcgcaacaagattttatttgttggtactaagcgtgcagcgggtgcggtaatccgtgaacaagcacagcgtgcaggcatgccttatgttgaccatcgttggttgggcggtatgctaacaaactggaaaacacttcgccagtcaatcactcgtctaaaagagctagaaaagcaagctgaagatggtacatttgcaaaattgactaagcgtgaagcacttgagcgtacccgccaaatggaaaagctagagcgtgctttgggtggtatcaaagagatgggcggtttgcctgatgcgttgtttgttgttgatgttgaccacgaagccatcgccatcaaagaagccaaaaaccttggtattcctgtgattggtattgtagataccaactcaaacccagacaatgttgactatgtcattgccgccaatgacgatgcaattcgtgccattagcttatatgtaacagcgatggctgatgcgatcattgcaggtaaagagtacgctaaaacccaaggtcatgctgatgcagctgatgctgataagcaagccaaccgtgaaaatgcaaccgcacctgttgaagataaagttgaccaagctggtcaagtggttaacaactac

SEQ ID NO: 4 - DNA, 3624 bp, Moraxella catarrhalis
atgcgcctaaaatctttaaaactggctgggtttaaatcctttgccaatcctacgacatttacttttcgacacgatattactgcgattgttggaccaaatggttgtggcaaatccaatgtcatcgatgcaattcgttgggtgcttggtgagacctctgccaaacagctgcgtggcggggcgatgagcgatgttatttttgcaggtgttgaagggcgagctgcgaagagtttggcaagtgttgagctgatttttgaacatacgcaagacgaaacccacggcattcgccatgaattaaatctatatcaagagctgtcactacgccgtcaagtcactaaagaaggtaaatcggattattttatcaatggtcagcgagtgcgtcgccgtgatgtggtggatgtatttttgggaactgggcttggtgcacgtagctatgcggtgattgagcagggtatgattgggcggattgttgagtcaagccccatgcagcttcgagaatttattgaagaaggtgcgggcgtatctcgctatcaggcacgccgtgctgagaccgaaaaaaaacttggcgaaacccaagataatcttaaaaggctttcagatttacaaggtgagctaaaaaaacagcacaaaacgctcattcgtcaagcacagtctgccaaacagtaccaagccttaaatgatgaattaaaaacgcttcaaaaagaagagttaatcagacgcttatttgaagcgtggcatcatcacgaacaaaaaaagattgagcagggtaaatcaggtgaggtgcttgccaagctagacgctaaagccaatcaagtacgccgtgagcttgacctactgtctgcgcgtgttgccgaggctcagtggctaaaagatgacgccaaagacaaccatcacaatgcacagatggcagagcagaccgcacagcataatttttatacagtcaatagccaaattacccaaaatgatgaaaaaattgctcgcctacaagctcagcatcaagaagctttgaccaagataaatcaggcacaagacgagcttttacaaattaaccaatcgctagatgtcattacgcctaaagcagaagcgatgacgcatgagattacccatgccaagcaagctcaaagtgaggtgcagttgacttggcagtcgcaccgagatgagctaagtagcctaatgcaagaaaaaaataatcttgaaaatctcaagaaattggcacaatctcagcgtcagcgtttggagattggattaaataaatggcaagttcgttatgatgagcttatcactgccaaaaatctatttagcgatactattgaagtgcaaaatcagctgtctgctgataccttaaaagctgtggcactcagacaaaagcttgaacatcttaatgatgatgagatgctaaaatcacttgtagacgagctgactcaagcagtgcaaacatcccaaatccatgtacaaagccaagaaaaacgccatgccagtttgatgggtgaatatgaaattttgcacaaactggtacacactaaagtaccgtctcataaaattacgacgccgcctgatgctgatacatcaatagccttaaatgcactgccaagtctaaaagaaagtttggtactaacagaaatgggtttgggttatgcagatgttttggatcagtttttgggattttggttgaatgcccgtctaagcgatgagctgccaacggctgttttgggtcatgtgatggatgataatgattatatgatcttaaaatcaggtaaaacaagcgacacggacatgactgctttggcagcctctgctaatgagaggatatctcaactaccaacatcaatacaacagcaactggtgcgttttgatcgactgtttagcatgcctacgcttgagttatttggctgctgttatttatatgtgggcgatgagccgctcacagacttggacacaaatgtaccatttggtatgataattatgacaaaagctggttggctggtgggcagttttggtatgttacacctttcaaaacttggtgataccagcagtcagtttttaagtgatcggaaaaaacaccttgagcgactagaggtgctagaagatgaactaaacacacttgaagattcgcttgaaaaagaccaaaagcagctcaagcaagtactgacaaggcttcaaagcagtaaaattgagcttgaagaaatcactgcccaaaaaaatgtggtcacccagcagctgcaccagttagaacaaggcttgaccatgctaaccgccaaacttgattctgaaaaagcacgccgtgagagtattgacagtcagctcaagcgactggatgatgaaaatagcagtattaaaaatgagctacaagagcttaatatgcagattgagacctgtgattttggcttaagggagcttgagcctaaagttgagcaagcaaatcaagccatggcggtgcagacggtgcgtatcgacgaagctgttgctaagcttaaaacccaaaatgatacatatcaggctttacaaatcaaacttggcacactgacgcaagcaaaaacccatgccgagcgtttgcttgagatggcaaaacatagtgcatcacaaactcaagcggacattgagacaaccaaaagcacgcagcaggaactcagtcaaaagctaccagtgcttgaagaggcgtttaaagctgccaaagcggtaagtcatgagcttaagattgctagtgatgaatatgagttggcagccaaagcacagcaaattgcccaaagtcaattgcaagaaacgctgactgaggcacataccaaatttgccaccgctcaagcaactttggcacagatcagtgcagatacagcggttggtgaaagccgtgttcaagacattggcggtgagcttatgcgtctggatgaatcgtttaatttagcgtctaaactggcagattttcggacaaatcctaatcaaaatttcaccgataattcagcaaggcaaaatcaaatcaaaagtaaaattgctgagcttggtgcggtgaatttggcagctacagctgagcttgccgagcttgaggcgcgtgtttcgcccatggatgagcaaatcaatgacatcacccaaagcatgaaaaagcttcaagatgccattcgtgcgattgacgaaaaaaccaaaacactgtttttgacagcacttgaggcggtaaataaagagctaaatgcactattttcaaaggtttttggtggtggtcaagcaagcttaactttgatggcagatgatgacttgcccaaatcggacaaatggcgagcagggcttgtgctgatggctcaaccaaagggtaagaaaaactcaagacttgctgtgctttcaggtggcgaaaaaaccttgacagcattgagtttgatttttgctatttttaagcagcaccctgcgcctttttgtgtacttgatgaggttgatgcaccgcttgatgatgccaatgtcgccagatttacagggttgattagagaattggctgatgatgttcagtttatttttattagtcataataagcttgccatgcaaatcgctgatgagttaaaaggcattaccatgccaaccgctggtatctcaagtttggtgacagttgatttacaagaagcccaaaaatatttagaagtcaatgac

SEQ ID NO: 5 - DNA, 2172 bp, Moraxella catarrhalis
atgtcaaaacaacaatatcttttatcgggcgtggcaagtgccatggcttttgcattatttgcaagcagtgtggcatcatttgctcaagcatctgaccgcactgcatttatacaaaagccagagcaaagggtgaccgcacgacaagtggcgatattgcttgatcgagcacattataacgaccaaagacttgatgaaagcatgagccaagttattttgcagcaatattttgataagcttgaccctaaccgtacgctattgttacaatccgatgtggatgaatttattagcaaatatggtaaaacttatgcagcttatttaatacgtggtgatttgacgcctggtattgagatttttgagcgttttcgtacgcgttcttttgagtattttaaagctgccaaagcacacttagcaacagatattgatttatataccaataaaagcattatattagatcgtgaaaaagcaccacggtttcggagcaaaaaggagcaacttgagtattggaaaaaccaaacgacattgtcattaattaccattatgattaatcaagacagcgacaaagcaaaagatcaggtttatttacaaaatcctgagttggctcgaggtcaagatttggtcaaggctgaaagtcgcacccctaaagagattttattaaatcgtatcaaacgccaagaagaacagcttgaacgactgaaaaatgatgaggtgatggagtcgatacttgatgcggcagccatcgcatatgatccacacagtaattattacgctcccattcaagcacaggatatacaaatccaaaatagtctacagcttgagggcattggtgtttctattcgacccgatcgcaaaaatcctgattacacacgcattatcagtttggttgatggcggtcctgctgccaaatcaggtcagatattggcaaatgatttgattatcggtatagcccaatctgatggtgaaatggtggatacgataggctatagcaccagagaaattgttgctttaatccgtggtactcgtggtactgaggtaaccgtcaaggtcaagcagccaaatacaccagattcgcaggccagaacggttactttggtgcgtgatatcattcgacaagaagaatcaggcgtgcagtatcgagtgattgacatgccttatgatggtagtataaaaaaagttggtgtgattgagattccaagcttttatctgaattttaaagcacgccgtgagggtattgatgccagtcagtaccgcagtgtcagccatgatacccaaaaagctttacaagcgttaaccgaccaaggtatcgatggcttggtggttgatttgcgaaataatcccggtggttcacttgatgaagttgccaaaatgcttgccatgttcatcaaggaaggtcctttggtgcaaattcgtgataatcgtggtaatgtgcaagtttttgaagatacagacggtgggcatcaattctatgatggaaaattgtctgtactcattaatcttggttcggcatcggccagcgagatttttgcagccgccattcaagattatgggctaggtttggtggtaggtagcacaaccactggcaaaggcacggctcagactcagcgagatgatttggcattaggttcgatgactttgacgcagcgtaaattttatcgtgtgaatggtggcagtacccaaaccaaaggcgttgtaccagatgttgaattggtaaatatttatgaaggtatcgaatttggtgagcgtgaatataaaaatccattgccttgggataccattaactcaaccaattatcacgctgaaggtaaatattcgccaagcctgttaagctcactcaataagcaatccaaagcccgccaagcaagtgacccacagtttaggtatttatctgaactaaatgccattcgcacgcttgatgatgataaaaaaccgactgagattaatttacaaaaacgccgtgccagacttgatatgattgaaaaacgcaccttggctgctgaaaatgcacgcaggcaagccacaggcgaggcaccatttgtagattggtcaacttatcaagccaatttggaggcattggctgaagagcggagcgctatgaaagaaaatgagcgtccaaagttgcccgaaagcgaggtttatgtgtttgaggcagcacgcttgatgtttgatgctgagcga

SEQ ID NO: 6 - DNA, 4215 bp, Moraxella catarrhalis
atgaaaggccctgctgacaatggcgtcaaagaatttgatagcattcaaatttctttagcgtcacctgaggcaatcaaatcttggtcgcatggtgaggtcaaaaagccagaaaccattaactaccgcacctttaaacctgagcgtgatggtctattctgtgccaaaatttttggtcctgtcaaagactttgagtgtttgtgcggcaaatataaacgccgtaaatttcaaggcatcatttgtgagcgttgcggtgttgaagtgactgcggctaaggttcgccgtgagcgtatgggtcatattgagcttgcctctccagttgcgcatatttggtttttaaaatcgctacctagccgtatcggtcttcttttggatatcactttgcgtgatattgagcgtgtgctttattttgaaagctatatcgtgaccgatcctggtatgaccagtcttgaaaaatatcagctgttggatgatgaagagtattttaatgcacttgaacaatatggcgatgagttcattgccaagatgggtgctgaagctgttcaagatttgctgcgtgatattgatgtggatggcgaaattgatgagcttcgtactgcaattccacaaactggctctgaaaccaaactgaaaaaaatgtccaagcgcttgcagttacttgagtctttccgtgactcaaataacaagcctgagtggatggtgatgactgtgttgcctgtgttgccaccagatttacgccctttggtaccgcttgaaggtggtcgttttgccacatcagacttgaacgatttgtatcgccgtgtgattaaccgtaataatcgtttaaaacgcctgcttgagctgaatgcacctgatatcattgtgcgtaacgaaaagcgtatgctacaagaagcagttgatgcactactggataatggtcgccgtggccgtgctattacagggtctaacaagcgtccattaaaatcgcttgctgatatgattaaaggcaagcaaggtcgtttccgtcaaaacctacttggtaagcgtgtggactattctggacgctcggtgattgtggttggtcctactttgcgtctgcatcagtgtggtttaccaaagaaaatggcacttgagctgttcaagccgtttacctatgccaaattgctgcaaaatggcattgcaagtaccattaaagccgccaaaaaaatggttgagcgtgaagagccagccgtttgggatatgcttgcgatggtcattcgtgaacatcctgtcctactaaaccgtgcaccaacacttcaccgcttgggtctgcaagcgtttgagcctgtgttaattgagggtaaagcaattcagttgcacccactggtgtgtgctgcgtttaacgccgactttgacggtgaccaaatggcagttcatgtaccgctgactttagaagctcagcttgaggctcgtgctttgatgatgtcaaccaacaacatcttgtcgcctgcaaatggtgagccgatcatcgtgccttctcaagatgttgtgcttggtttgtattatattagccgtggcggtgtgaatgccaaaggcgaaggcatggtatttagtacggtgaatgaagctctaagagcaattggttcagatgatttatctgtgaatgccaagattaaagttcgtgtcgctgagacaattttggatgaaaaaacaggtgaaaaaatcagtcataccagtatccaagataccgtagctggtcgtttgctaatttggaatatcatgccagaaggcatggcgtttagtgagtgtaacacggagatgaccaagaaaaatatctctaagctgttaaactcatgctatcgtaagctgggtgttaaagaatcggtaatgtttgctgaccatctgatgtatttgggttttgcacaagcgactttatcgggcatttcgattggtatggaagatatggttattccaccaaccaaaaagcagatcgtggatacagctgatgctgaagtacgagatattgaacaacaatttgagcaaggctttgtcactgcaggtgagcgttataacaaagttgttgatatttgggcgcgtacttcagataaaattgcaaatgcgatgatggataacttgtctaaagacgatgtgatcaacgcagacggtgagaccgaaacgcaaaagtcattcaactcaatttatatgatggccgactcaggtgctcgtggtagtgccacgcagattcgtcagcttgcaggtatgcgtggtctgatggctaagccagatggctcaattattgaaacaccaattaaagccaatttccgtgaaggcttgacggtacttcaatactttatctcaacgcacggtgcccgtaaaggcttggcagataccgccttaaaaacagcaaactcaggttatctaacacgccgtttggttgatgtcgcacaagacttggtcatcacccaagatgattgtggtacagatgcaggtcagcgaatgacacctgtgattgttggtggtgaaattgttgaacgcttgggtgatcgtgtgcttggtcgtgttgctgccaaagatgtcgtgaatgcagatggcgatgtggttgtaccatcgggcgctttgattgatgaaagattggttgaaaagttagatgccaatgcgattgatgaagtgtatgtacgctcagtcattacttgtgaagccacccaaggcgtctgtgctaagtgttatggtcgtgatttggctcgtggccatttggtcaatattggcgaatctgttggggtgatggcggcacagtcgattggtgagccaggtactcagctgaccatgcgtactttccatgtcggtggtgctgcttctgctgcttctgttgataacagtgtctcagttggtaatgcaggttcggttcgttttcacaatatgaaaactgttcagcatgccgatggtcatttggttgttgtctctcgttcggcagagattggcgtggctgatgatcaaggtcgtgagcgtgagcgttataaagtgccttatggctcaagcgtcttggtgcgtgatgcagatgctgttgaagcagggcaggtaatcgccaaatgggatccacatacccatccaattattacagaattctcaggtaccgcacgctttagtgacattaccgatggcatgacagcaacggttaaggtggatgagatgacgggggtgagatcatttgaaatcttgaccagcaaagaccgtccaagtattgctaaggatttgcgtcctgcgattattcttgataccgatgaaggtaaagaagtggtttatttcctaccgaacgaaaccatcattcgtgtatctgaaggcgagcatgtcacggcaggttcggtgcttggtcgtgtaccacaagcaacctcaggcaccaaagatattaccggtggtctgccacgagttgccgacttgtttgaggcacgccgtccaaaagatcatgccattatggctgagatgagcggtgtggtcagttttggtaaagaaaccaaaggcaaaaaccgctttatcatcaccaatgaagatggtgatgtgcatgaagagctgattccgaaatggcgtcaaatcaatgtctttgaaggagagaccgttgagcgtggtgaggtggtttctgatggacctcaaaatccgcatgatattttacgcctaaaaggtgagaccgcattggcaaattatattgtcaatgaagtgcaagaagtttatcgcctacaaggggtaaaaatcaacgacaagcacattgaagtcatcgttcgtcagatgttgcgtaaagttgaggttgtcgatggtggtgattcaagctactttaaaggcgaccaagcagaatactcaaaaatccgtacgcttaatgctgaattgatcgctaataataagtttcctgttcaatacgagcgtcagcttttgggtattactaaagcaagtttggcaaccgaaagctttatttcagcagcgtccttccaagaaacgacccgtgtcttgaccgccgctgcagtgatgggtaaggtggatgatttgtctggcttgaaagaaaatgtggttgtgggtcgcttaattccagcaggtacgggtttggcatatcatcaatctcgccaaagaaaagctcaaaatgctggtaaccaaactgcccaagtggatgagttattatcagtcataacagctgaaccgcctacaacttcagaagataatttgagtattgaagacaactttgccaaagcattcgctgatgagctgggttctcaagag

SEQ ID NO: 7 - DNA, 4089 bp, Moraxella catarrhalis
atggcatattcttataccgaaaagaaacgtattcgcaaaagtttttcaaagcttccagatgtcatggatgtgccttatctgcttgccatccaagtggattcttatgagcaattcttacaagagcataaaaaaccaaaagctcgtgccaacattggtttacaagcggctttttcatcaatttttccgatcgaaagccactctggtaatgctcaattgcaattcgttgagtattacttgggcgagcctgaatttgatgagcgtgaatgtattatgcgcggttcaacttttgcggcacctttgcgtgtaaaaattcgccttattattaaggataaagaaaataaaactgccattaaagatgttcgtgaacaaagcgtttatatgggcgaaattccattgatgacagataatggtacttttattattaatggtactgagcgcgtcatcgtttctcaattgcatcgctcacctggtgttttctttgaccatgataaaggtaagtcgcattcaagcggtaaagtgctttataacgcacgcattatcccttaccgtggttcttggcttgattttgaatttgatgctaaagatttggtgtacgcgcgtattgaccgccgtcgtaagttgttggcaacgattattttgcgtgccattggtatggataccgctcaaattttagatcaattttttgaaaaagttgaagtatttaaaggtgatgaatcctttgaaattgaactggttgctgatcgtttaaaaggtgagatggctcagtttgatattatcggtcctgatggtaatgtgattgttgaacaaggtcaacgcattaacgcacttcgtgtaaaacgaattttaaactcaggtatgaccaagctcgcggtacctgatgaatatttgtatgagcgtatcattggcgaagatattgtggttggggatgaggttttagttcgtgccaataccttgatcgaccatgagattctggtaaaacttgctgaaaaaaatgttcaatcatttaagattttattcacgaatgatatcgatcatggtgcatatatcgctgacacgctacgcgccgatacaattgtgactcgtgaagaggcattgattgagatttataaagtgatgcgtccaggtgaaccaccaacacttgatactgctgaaaaactttttgaatcaatgttctttagccaagagcgttacgacttgtctaatgtgggtcgtatgaagtttaaccgtcgattgggtcgtgagttcattgataccgatgatatggatgtgcaacgcgaacaaggtgttttatccaatcaagatatcgttgatgtcttaaaagagttgatcgagatccgtaatggtcgtggcgaggtggatgatattgaccacttgggtaatcgccgtattcgctctgtgggtgaaatgactgaaaaccagttccgtatcggtttggcacgcgttgagcgtgctgttaaagaacgcttaaccacagctgattctgataatttgtctcctcaggacttgattaactcaaaacctgtggcagcatctattaaagaattttttggctcaagtcagctatcgcagtttatggatcaaaataacccattatctgagattacgcataaacgccgtgtatcagcattgggtccaggtggtttgacgcgtgagcgtgcaggctttgaggttcgtgatgtccatacgacccactatggccgtgtgtgtccaattgaaacccctgaaggtccaaacattggtttgatcaactctttagcgacttttgccaaaacaaataattttggcttcttggagacaccgtacagacgcgtcgttgatgggcgtgtgactgacgaaattgaatatgtttctgccatcgaagaagtaggcatggtaatcgcacaagccgactcaccaatgaatgacaagggtgagctgaccgaagagatggttagtgttcgtcacgatggtgaatttgtgcgtatgagcgccgataaagttactcatatggatgtttcaccgcgtcaggtggtatcggtagcagcaggtctaattccattcttggagcatgatgatgcaaaccgtgccttgatgggttcaaacatgcagcgtcaggcagttccaacactgcgtagtgataagccacttgtaggtacgggtatggaacgccatgtggcgcgtgactcgggcgtgtgtgtggtcgctaagcgtggtggtgtgattgaagaggttgatgccagtcgtatcattgtgcgtgtcaatgaggatgaaatgactgcaggtgaagcgggtattgatatttataatttgattaaatacacccgttccaaccagaatacctgtattaaccagcgtgttatcgtcaatgaaggcgatgaaattgagcgtggcgatatcttggcagatggcccatcgactgatcttggcgagcttgcacttggtcaaaatatgcgcgtggcattcatgccttggaatggctataactttgaagactcaattttactttctgagcgagtggttcaagaagaccgtttcaccacgattcacattcaagagttaacttgtgtggctcgtgataccaagcttggaccagaagaaattacaggcgatattccaaatgtcggtgaggctgcattggcaaatcttgatgaagcgggtattgtgtatatcggtgctgaggtcgatgctggtgatattttggttggtaaagtaacaccaaaaggtgaaagtcagctgaccccagaagaaaaactacttcgtgcgatttttggcgaaaaagcggcggatgttaaagatacctctttgcgtgtaccatcatcaaccaaaggcacggtcattgatgtgcaagtctttacccgtgatggtcttgaaaaagacagccgtgccaaatctattgaaaaagccatgcttgatgattaccgtaaagatttaaaagaagaactggtgatttttgaagcagctgcaaaaggtcgtattttaagcttacttgatggtaaaaaagtcagcggtggtgcaggctttaaagcaggtacgattctaagcactaaagacatcgaaaatttgccactagaaagcttgctagatatccagcctgctgaagaggaagtttcagagcgtttgggtcagattgctgaattcttaagtgataagcaaaaagatatcgataataaatttaccgagaaaaaacgcaaattaactcaaggtgatgacttagcacatggcgttcagaagattgttaaggtgtatttggcggttaagcgtcgtatccagccaggtgacaagatggcaggtcgtcatggtaacaaaggggttgtatcacgcatcatgccagttgaggatatgccatatgatgaaaatggtaatcctgtagatatcgtactaaacccattgggcgtaccatctcgtatgaatatcggtcaggtgctagagacccatttgggtatggcagccaaaggtttgggtgataagattaatgccatgttgcgttcgcaagttgctgtgagtgagcttcgtgaattcttagataagatttataaccaagtcggtggtgagcaagtagatttagacagcttgtctgatgaagatttattggcactgtgtcagaacctaaaagatggtgtcccaatgggtacggccgtttttgatggtgccaaagaaactcaaatcaaagagctgttaagtttggccgacctatcaaccacaggtcagcaaacactttatgatggcagaacaggtaagaaatttgatcgtcctgttacggttggctacatgtatatgcttaagctaaaccacttagtcgatgataaaatgcacgcccgttcaactggctcttattcactggtaacacagcaacctcttggcggtaaagcacaatttggtggtcagcgttttggtgagatggaggtttgggcgctagaagcttatggtgcaacttacactctacaagagatgctgacggtgaagtcggacgatgttgagggtcgtacacgcatgtataagaatattgtcgatggcgagcagtatatgaatcctggcatgccagagtcgttcaatgtcttaaccaaagagattcgctcgctgggtattaatattgacttaaaagaaaagaag

SEQ ID NO: 8 - DNA, 357 bp, Moraxella catarrhalis
atgattccttttttactcgctggtgcgcttatcgctggggtattcgttgctacagctttctggaaagagatcaaatcttttatccaggccagtattgagcgcataaaaacccacctaatacccagtatgattgttggttttaaaacttatcttcaaacgggtaatgccttatatgccaccgcaaaagctctacagaagtttttttcaaaaaatgaacgaggacaatggcaggaaaccatcatgacgcgcaatgtgccagcaaatgaaatcccagaagatattcgcaggaaggttgagaataacagaggacctgttgatattacagatgaggtacaagcagaattacatttggaggtg

SEQ ID NO: 9 - DNA, 345 bp, Moraxella catarrhalis
atgtgtgcacccgcttctagcagcggtaaaatgacgccccgtgccgcaccacctgcaccgataagggcaatttttttattatccagctcgattgcctgtgcgtacaaatctgcaaccaacccacgaccgtcagtgttatcaccatacagaccttgttggtcttgtaaaatggtatttaccgcacctgcagcaagggcatgcgtactgaggcgtccgtttgatttaatcatctcaaatgccatttctttaaagggtagggtaatatttgctcccacaccgcccccagcaaaaaaagcagacacaacggcggtaaagctgtctgcgtcattgggacaatattgtttt

SEQ ID NO: 10 - DNA, 1377 bp, Moraxella catarrhalis
atgctaaaacatcactttgccaccacatacaccccaagtcaaatcacagctctcatcacgacgcatcaccctgattggcaagtgtgctttttaaataatgcacatcgccctgtgattgggatttgtcctaaggttgcatggacagccacttttgataaaaatctgtacattcacaaaaaaactcgtcaagcagatggggtacagagtttaaatggacgacgctacccatctacttatgacaactggcagcatgagctgacggcatatgccaatcaaatgaatctcgatgattatcatggcttaaatcatagcagctatgtgcatggatttatgggatttattagctatgatttatcagcacatcagttaaatcatcgcattaccatcaagccaaatcaaccttgtggctatttggcacattatgatatttatcttcagcccatcaaagacggctataacttaattggcatgggcgtttgttctgaattttttcagcgtattacccatcagttatctgacttattatgtcgttgtccgcccacagcatcgccgatagactttcagcctatttggacaaaaacagagtatgccaaagcattttatcaaacccaagaatatctaaaagcaggcgatacttatcaaatcaacctaacccaaaaatggcatgctcatttagaccgtctggcaaaccacttgcctgatttacaagacacaatgaatgcaccttttgcaggatttttacaattgggggaatttgaactactctccatctcaccagagctattttttgaattttacaaaacaaacggtaaaatccatctgatcaccaagcccattaaaggcacacgcccacgccatacagaccctattatagatgatgagcttaaacaatctcttgcaaatagcgaaaaagatatcagcgaaaatctgatgattgtggatttgctcagaaatgatttgggcaaatatgcacaaattggtacggtcaaaacgcccaagcgtttcgccatcgaaagctttaaaaatgtgcatcacatggtcagcactgttacagcgacgctcagtgatacgcatccaattaccgtcttattcggctcgctgccagctggctctatcacgggtgcacccaaaaaacgggcatgcgagattatccatgagcttgaaacctcacctcgcggtgcctactgtgggacgatgggctatatgaattttgacggtacaggcagctggaatgtattaattcgcacactacaaaaatggcaagaatgcgagatctgggcaggtggtggcattaccatcaaatcaaatgttgatgatgagtatcaagaatgccaagataaaattggcactattttggcaaaaatgtctaagccaaaa

SEQ ID NO: 11 - DNA, 162 bp, Moraxella catarrhalis
atgggtaaaggggctttatcactttttaagccatcacccaaaccatcgcctaaaccatcacccaaaccatctgggctatccaaactgtccaaactgcccaaatccttacccaagccttcatctgataaagcatcagcagatggcagctcatgcgtgggtgta

SEQ ID NO: 12 - DNA, 3000 bp, Moraxella catarrhalis
atgtcaaaatctatcacaaaaacacaaacaccatcagtccataccatgaccacgcaccgcttaaaccttgccatcaaagcggcgttatttggtgtggcagttttgcccctatccgtctgggcgcaagagaacactcagacagatgccaactctgatgccaaagacacaaaaacccctgtcgtctatttagatgccatcacggtaaccgccgccccatctgcccctgtttctcggtttgacaccgatgtaacagggcttggcaaaacggtcaaaaccgctgacacgctggcaaaagaacaagtacagggcattcgtgatttggtgcgttatgaaactggggtgagtgtggttgaacaggggcgtggtggcagcagcggatttgccattcatggcgtggataaaaaccgagtgggtattaccgtagatggcattgcccaaattcaatcctacaaagatgaatccaccaaacgagctggtgcaggctctggggcgatgaacgagatagagattgaaaacattgccgccgttgccatcaataaaggtggtaatgccctagaagcaggctctggtgcgttgggcggttcggtggcgtttcataccaaagatgtgagcgatgtcttaaaatctggtaaaaatcttggcgctcaaagcaaaaccacttataacagcaaaaatgaccattttagtcagacgctggcagcggcaggtaaaaccgagcgtgtggaagcgatggtgcaatatacctaccgtaaaggcaaagaaaacaaagcacacagcgacctaaatggcatcaaccaaagcctatatcgcttgggtgcatggcaacaaaaatatgatttaagaaagcctaacgaactgtttgcaggcacaagctatatcaccgaaagctgtttggcaagtgatgacccaaaaagctgcgtacaatacccttatgtctacaccaaagcccgaccagatggcatcggcaatcgcaatttttctgagttaagcgatgctgaaaaagcacaatatttggcgtccacgcacccccatgaggttgtctctgccaaagattatacaggcacttatcggctattgcctgaccccatggactatcgttcagactcgtatttggcacgccttaacatcaaaatcaccccaaatctggtcagtaaactgttattagaagacaccaagcaaacatacaacattcgtgatatgcgtcattgtagttaccatggggcaagattgggcaatgatggtaagcctgccaatggtggctccattgttctttgcgatgattatcaagagtatctaaacgccaatgacgcatcacaagcattatttagaccaggtgctaatgatgcccccattccaaaactggcttatgccagaagcagtgtgtttaaccaagagcatggcaaaactcgctatgggttaagttttgagtttaagcctgacacgccatggtttaagcaagcaaaattaaacctacaccaacaaaatatccaaatcattaaccatgacattaaaaaatcgtgcagccaatatcctaaggtggatttaaattgtggcatcagtgaaattgggcattatgaatatcaaaataattaccgttataaagaagggcgtgccagcttgacaggcaaacttgattttaattttgacctgctgggtcagcacgatttgacggtgttggctggtgcagataaagttaaaagccaatttcgtgccaacaaccccagacgcacaatcattgacaccacccaaggcgatgccatcattgatgaaagcacgctgacagcacaggagcaagccaaatttaagcaatcgggggcggcatggattgtcaaaaatcgccttggacgcttagaagaaaaagacgcctgtggcaatgccaatgaatgtgaacgcgcccccattcatggcagtaaccaatatgtgggcattaacaacctttatacaccaaatgattatgtggatttaagttttggtggacgcttggataaacaacgcattcacagcaccgattcaaacatcatcagcaaaacttacaccaacaaaagctataattttggagcggcggttcatctgacacctgattttagcctgttgtataaaactgccaaaggctttcgtacgccaagtttttatgaactgtacaactataacagcaccgccgcccagcataaaaatgaccctgatgtgtcttttcccaaacgagcggttgatgtcaaacctgaaacttccaataccaatgaatacggctttcgctatcagcacccttggggggatgttgagatgagcatgttcaaaagccgttacaaggacatgttagataaagccataccgaacctaaccaaagcccagcaagagtattgtaaggctcatttggattccaatgaatgtgttggcaatccgcccacgcccaaaaccagtgatgaggtatttgccaacttatataatgccaccatcaaaggggtgagtgtcaaaggcaaactggatttgcatgccatgacatcaaaactgccagatggtcttgaaatgaccttgggttatggtcataccaaattggggaaatttgattacattgcacccaaagatgccgatggttggtatcaggctcgccctgctttttgggatgccatcaccccagcgcgctatgtggtcggtctaaactatgaccaccccagtcaagtatggggcattggcacaactttaacgcacagcaaacaaaaagatgaaaatgagctaagtgcccttagaatccgaaatggcaaaagagaaacacaaaccttaacgcacacaatacccaaagcctataccttactggacatgacaggctattatagcccaactgagagcatcaccgctcgtcttggtatcaacaatgtattaaacacccgctacaccacatgggaagcggcacgccaactgcccagcgaagctgcaagcagtacccaatcaacccgttacattgcaccaggtcgcagttactttgccagtcttgaaatgaagttt

SEQ ID NO: 13 - DNA, 2613 bp, Moraxella catarrhalis
atgagtactgtcaaagtcccccacattttctaccaaaaacgcacccttagccttgccatcgccagtatttttgctgccgtggtgatgacaggttgccgctctgatgacatcagcgtcaatgcacccaatgttacccagctgccccaaggcacggtttcaccaacgccgaacacaggtcatgacaacgccaataacgccaacaatcagggcaacaacacggataacagcaccagcacaactgacccaaatggcgatagcaaccaactgacacaagcacaaaaaactgccgccgccgcagggttttttgtgatgggtaaaattcgtgataccagcccaaaaaatgacccagattatagcaatgatttaaaacagcagtggctgggcaaattatatgttggtattgatgcccatcgcccagatggcatcggaaaaggtaaaaacttgcgtcagcccatcaccgccaatgacatcaaacccttgtattttaacaaattccctgcattgtctgatttgcacttagacagtgaacgccatcgttttgacccccaaaagataaacaccattaaagtgtatggttatggcaacttaacaacaccttccaacaataacactcacatcaatcatcagcaagctgataatgttcaagccaaaaagtccgccgatgcttatgaaaatatccgttttgggtatcttgaactacaaggaagcagcctgacccaaaaaaatgccgataatcaaaatgagcaagaccgcattcccaaacccatgcccattttgttttatcatggagaaaacgccagcagccagctgcccagtgctggtaaatttaactacaaaggcaactggctgtacctaagtgatgtcaaaaaacgccccgccctttcagcagcagatgagcgagtggggacctatctcaatgccagtggcaaagccaacgagggcgatgtcgtcagtgccgcccacatttatctaaacggctttcaatataagcacacgcctgccacttatcaggtggattttgacacaaactcattaacaggcaagctgtcctattatgacaatcccaatcagcaaaataataaaggcgaatatctcaaaagccaatttgacactaccaaaaaagttaatgaaaccgatgtgtatcaaattgatgccaaaatcaacggtaaccgctttgtcggtacagccaaatctttggttaataagaatacaaaaaccgcaccttttatcaaagagctgttctctgatgctgccaacccaaacaacccaaaccccaactcagatacgctagaaggcggattttatggtaagtcgggcgatgagctggcgggtaaatttttatccaatgacaacgcatcttatgtggtctttggtggtaaacgagacaaaacagacaaacctgtcgccacaaaaacggtgtattttagtgcaggctttgaaaaacccagcaccagttttgtggataatgaaacgattggtggaatcattgataaagcaaagttaaatgataaaatcaatgaacaaattgatgatggtgatattcctaccagtgatgaacgctataatgaatttccttggggcgaaaaaaaagcagagttcaccaaaaaagtcagcagcagcacccaagccgtgccagcttattttgggcaacatgataaattttattttaatggcaactattatgacctatcagccaatcatgttgataaattagcccctaccgatgctgtcaaagccaaccaatccattaaagaaaaataccctaatgccacactaaataaagacaaagttaccaccatcgtgttacaagaagccaaagccgataagccgtataccgccattcgtgccaaaagctatgaccacatcagttttggtgaagtattgtataatgataacaaaggcaacccaacacgcagttattttgtgcaaggcggtagggccgatgccagcaccacgctgcccaaggcaggtcaattcacctacaacggtctttgggcgggctatcttatccaaaaaaaggacaaaggttatagcaaagatgaagaaattatcaaggcaaaaggtcatccaggttatctgttaaccgaaaacttcaccccagaagaagatgacgatgacagcttggtcgcatctgctgactctcaaaatgatgacgccgatgacgccgatgatgatggtgcagataatgtgtaccatgcaggtgatattcgccctgaatttgaaaacaaatacttgcccattaatgagcctactcatgaaaaaaccttctccttagatggtaaaaataaggctaagtttgatgtggattttgacaccaacagcctaactggtaaattaaacgatgagagaggtgatatcgtctttgatatcaaaaatggcaaaattgatggcacaggatttaccgccaaagccgatgtgtccgattatcgccatgaggttggcaataacagtagtggcggatttttatacaacattaaagacattgatgttaaggggcaattttttggtacaaatggcgaagagttggcagggcagttacagtacgacaaaggcgatggcatcaatgacaccgccgaaaaagcaggggctgtctttggggctgttaaagataaa

SEQ ID NO: 14 - DNA, 666 bp, Moraxella catarrhalis
atggctcaaagaccccaaaaacagccttctgccgtctataaagatgaagtacataatcaaagagtaggtttaagtagcttgctttggattgtcgtggggctattggtggcagcgatgctggcggtttttttgtatgtgtcgcctttatttgatggttttggtcaaagcgcagatcctaaacctgacgctttggttaaacccattaccgccagcgaacctgaaattgaatttgaattttatgaagttctgcccgaacaaaaatttcaaagcattccagaaggcgtgagcatccaagaccgagaagataataccttgcccaagccatcaaccgatgtgatcatcaatcacagcacaaaagcgagtaccgaccagccagctgacatttcaatcgccgcagaaaataccgctgatgatgagcctaatcaccaaagccaatacatactccaaatcaaaagctatgaaaaggccaaagatgccgatctaaagcgtgctgaagtactcatggcaggtgtggatgccattgtggtacgccaagatacaaaaaatggctatgtgtatcaagttatctcaacgcccatgactcaaaaagaagcctctgccaccagtgtacgcctgcgtaataatggtattgactctttgcttatcgaacagcgtcctactcccaaa

SEQ ID NO: 15 - DNA, 1455 bp, Moraxella catarrhalis
atgtacagcattcatcaaaacactttaaggaatattatgaaattacacacatccgccctagtgctggctatgtctggtatcatgctatcacaaacggcattttccaatgattctcccaatcttagcaacagtgcatttcagcagtgtcttagcactttaaaaaacagtagtacctttcggagtgtctctggggtgacatttgaaaaatatcgcccatcgcagcctgatcccagcgtcattcgctcgctcaattatcagcctgaatttaaaaaagatgtttgggattatttggcgtctttggtagacagtgagcgtgtccaagacggtatccgtgccaagcatgagcaagctgatgtgctacgccgcattgagagccgctatggcgtcaagcctgagcatgtactgggcgtctggggcgttgagagtaattttggtcagacgctgggtaaaaaaaatttatttgatagcctagcgactttgtcttgttttgatcgtcgccaaagttattttcgtggtgaatatgccaatgcactaaaaattgtccaaaatggtgatattcgccctgaggatatgacaggttcttgggcgggagcatttggtcagacacagtttatgccgagcacctttttggagcttgcggtggattttgatggtgatgggcgtaaagatttggtcaactcaaaagccgatgcattggcaagtactgccaatttcttggtgaaacgaggctatcgcctaggcgaaccttggggctatgaagtgcgtcttaatggctataatggctcaagcggtcgtcgcaataagcaatcaatcaaccactggcgtgctcaaggcatcaccttgccaaatgggcaacctatcccaaataatatggcatcagcaggtttactactgcccgctggtaggcagggtcctgcattcttagttggtaagaattttgatactttttattcttataatgcctcagaaagctatgcgttagccatcgctcagctgtctgatcttgtgcgtgatgaaaataccaataccaactttgccacaccttggccgacagacgaccctggtatcggtcgccgtgaatccaaagaaatccagcaagcactcatcaatgctggctatgacatcggtgcggtcgatggcatcatcggtgataatacacgccaagcaattatggattatcagcgaaaagttggtgtgatgcccgatggtcgagcaggtcaaaagtttcaccgattaattactggtcgcactgcttccatccaatctgcccaaacaccagcccagtccataaatacgcccacaacccagtatcactcagtacagccaactgtcagcacgcaagccaatgcagcgagggcggtaattgtcaagccagcaaatactccgcctaccacagggacgacctatcggcgtgtcatcaatgccgatggcagctcatcttggatattagttaaa

SEQ ID NO: 16 - DNA, 306 bp, Moraxella catarrhalis
gtgctgcccttttcgctggtcaacatatacacacggtcttctttggcttctactgtgatcggtgcgtcccgctctttccagtcaggaatcagctcatcaagtgcgcgcgtttctatcacggcacctgatagggtgtgtgccccaaactctgagcctttttcgatgacgcagacggtgaactcatccattccagcagcgattgccaattggcgtaagcggattgcagcggatagaccagcaggtccaccgcccacgatgataacatcaaattccatagagtcgcgttcgatttgcatgaattatcct

SEQ ID NO: 17 - DNA, 570 bp, Moraxella catarrhalis
gtgaaaaaaattgcatttgctgctttgagtgtatccgtacttttattaagtgcttgtaccaacatacaaccaagcacccaaacgcccaccaccctgcctactgcggatacccctcttaaatttgcggtcacaggtaaaatcggcgtggttaccaccacccccgaaggtaggcaagcaggtagtgccttttatacttggacacaagaagatgatcgcttcgctattgaattgacaggtatgcttggtattggtgcaacccaaatccgttataacgggacaactgccgccttggacagtgaacgcacaggcacgataactgccgatacgcctgaagcacttttattgactgcaacaggctggcaagcaccaatctctcagctaccacactggatcttaggacgcggtgctcctgatgacagcacagccggctatgatcacttaggtcggctggtgtctgctgctaatggtgcatggcatgcccaatttgattacgacaaaacctctttgccgtcacgccttcgcatcacacataccaaccagcacagtataaccatgacagtaacacatcaa

SEQ ID NO: 18 - DNA, 951 bp, Moraxella catarrhalis
atgtcatatatggctgtcttttcaggtagtgccaaccctaaacttgcccaaaccgttgccgataatctgcacattcctttgggtaaggcagacatcaatcgtttttctgatggcgaaatcgctgttgaaatcaaagaaaatgttcgaggtaaagatgtattcattctgcagccaacctgtgcacccaccaacgatcatttgatggaagttattttattggcagatgcactgcgtcgctcaagtgctggtcgtatcacagccgtgattccttattttggctatgctcgccaagatcgtcgccctcgttcagctcgtgtgcccatctctgccaaggtggtcgctgatatgttgtcgattgctggtattgaccgtattatgatggttgatttgcacgccgatcaaattcaaggcttttttgatgtgcctgttgataacttatacggcacgcctgtgctattgcgtgatcttaagcaacaaaactatgaaaacttaatggttgtttcaccagatgttggtggtgtggtgcgtgcgcgtgccatggcaaaattacttggtgatgctgatcttgccattattgacaagcgtcgtgctcgtgccaatgaatctcaagtgatgcatattattggtgatgtatctggtcgtgactgtgtcattgttgatgatatcgttgataccgcaggcacactgtgtaaagccgctcaagcactcaaagaccatggtgcacgccgtgtggttggttatattacccatcctgttttatcgggtaaagccatcgaaaccattcaaaaatctgccctagatgagctggttgttaccgataccattccactttctgaagctgcctctgcttgtgcgaatattcgccaaatcagtattgcctcgatgattgcagaatcattacgccgaatcaataatgaagagtcaatcagcgccatgtttgagtatgatatt

SEQ ID NO: 19 - DNA, 546 bp, Moraxella catarrhalis
gtggtgctgggcttggcattgctgcttgttcaccccaatctccaacagtcgcagaacatcagccgcaacaacaagaacctctacaatacaccaacgctgaagcacaagcacttcaagagcaagccgccgccttacaagcccaagctgccgagcttgaaatgcaagctcaagaagcacaagcagatgccagccatgaaaccaaggcaacttctgccgatggtagcggtgtcggtagcctactggcaggtgctgcagcaggcgctgcggcaggttatgttgcaagcaaagttgctggtaatcgtgttgctaccgctcaagcttcacaaaccgcccaaacaccaacaaccacacagcaaccagcacaaaataaccaacaagccaccaacagcaatcgccaaagcctcgctcaagccacccaagacaaccgagctggcaccactcgccaaggttttggtgcgacaggcggtgcgacaggttcggcctcatgaagcgtatcactgttgcaccacgaccagattggcaaagcgaaatggcacgcattggctt

SEQ ID NO: 20 - DNA, 2871 bp, Moraxella catarrhalis
atggctcaagataaaattgccatccgtggtgcacgtacgcacaatctaaaaaatattgatgtagatattccacgagataaatttgtggtgattactggcttgtcaggctcaggcaagtcatcacttgcgtttgatactttgtatgccgaaggtcaacgccgttatgttgaaagtttatcagcatatgctcgacaatttttaagccaaatgcaaaagccagaagtagatagtattgatggtttatcacctgcaatcgccattgaacaaaagtccaccaaccacaatcctcgctcaacagtaggtacaattaccgaggtatatgattacttgcgtcttttgtttgcacgggtgggtgtgccttattgccctgaacatgatgaaccgatggtcgcacaaacagtcagtgagatggtagatgggattatgagtttgccgactgagaccaaattgatgattttagcacctgtcgtgcgtgagcgtaaaggtgagcatattgctttgcttgagcagttgccatctcaagggtttacacgcgtgcgtattgatggggtgatttatgagaccgatgagttaccaaaccttgaaaaaaataaaaaacacagcatcgaggtggtggttgaccgatttaaagtgcgtgatgatttgggaaatcgtgttgccgaaagtttggaggttgcattaaaacttggtaatgatatcgccattttgtatcacatggatggtaatcctgttggtgatgatgagcagatattatctgctaagcattcttgccctgtgtgtgaccgtgcggtgagtgagcttgagccaaggctgtttagctttaataatcctgcaggtgcttgccctgcatgtgatggcttgggtaagcgtcagtattttgcggccgagcgtatcgttacccatcctgaaaaatcactgaatcaaggtgctattcatggttgggataaacgtcatgcgtattattttggcttattatcaacggtttgccgtcattttggcattgatatggatatgccgtggcaagacttatcaaataaacaccaagcgattattttaaatggttcgggtagacaaaaaattgaatttaattttaccgatgaacgagggcgtaaaacgaccaaaaacactccctttgaggggattttgccttatctagaacgccgttatacaaccacaaccagtaatttggtgcgagatgagttggcacagtatctatcagatacccagtgcaatgtgtgccatggtgtacgcctaaatgatattgcccgccatgtgcgtgtggaggataaagccatcggtgatatcatccatctgccgattggggaggcgtggcaatattatcaaaacttaaaaattactggtgctaaaggcgaggtggctgataagattttcaaagaaatcaaagagcgattgggttttttgaccaaggtcggcttggagtatttgaccttggcacgctccgctgaaacgctgtcaggtggtgaggcacagcgtatccgcttggcaagtcagattggtgcaggcttaatgggcgtgatgtatgtacttgatgagccgtctattggactgcatcaaagggataatgatcgacttttgtccactttaatacagttgcgtgatttgggcaatacggtggtggtggtcgagcatgatgaagatgccattcggcaggcggattatattattgatattggcgttggagcaggcgtgcatggcggccgtgttgtggcatcaggtagtgcagaacaggttgccaacaccacagggtcgctaacgggcgagtacctgtctggcaagcgacgcattgaggtgccgactactcgccaattgcctaagaccatcgagataatcaaaggtaaaaaaaccatccaagagccattattgattcatttggagggtgcaactggtaataatctaaaaaatgttcatcttagtattccgattggtgtcatgacctgcattacgggtgtgtcaggttcaggtaaatccaccttgattaaccgtacacttatgccattggctgcgactaccttaaataacgccaccacacttgctcctgaaaaatatgaaaaaatttcaggacttgagcatttggataaaatggtggatatcgatcaaagtccgattggtcgtacaccgcgttcaaatcctgccacttatacaggcgtgtttacactgatacgagatttatttacccaaacgccagaagccagagcgcgtggctacaaagcagggcggtttagttttaatgtgaaaggcggtcgttgtgaggtatgtcagggcgatggattgattaaagttgagatgcattttttgccagatatgtatgtgccgtgtgatgtgtgtcatggtaagcgatataatcgtgaaactttggaggttaaatataaaggtaaatccatcagcgatgtgcttgatatgactgttgaggaagcgatgggattttttgaacccattcctgctattcatcgccgcctagaagcactgcatgaggtgggtcttgactatatccgtttgggccagtcggcaacgactttatcaggtggtgaggcacagcgtgttaaacttgccaaagagcttgccaagcgtgatacgggcaagactttgtatatcttagatgagccgacaacggggctacattttcatgatatcgctaagcttttgcatattttacatacattgcgtgaccgtggtaatactgttgtggtgattgagcataatttggatgtgattaaaacagcagattggattgtggatttaggccctgaaggtggtagcggtggtggtgagattgtcgccacaggtacgcctgagacagttgccaaaaatagccgttcacatacaggcagatttttaaagcctatgcttaag

SEQ ID NO: 21 - DNA, 762 bp, Moraxella catarrhalis
atgggttttgtaataaatacatggatttcatatacggttttattgtttaaattggcttttttgtctcataatgattacaatattaaaaacctaaaaaattcgattatgatacgactttatcttggcggctcgtttgaccccattcatcgggcacatctgcagatggtgctaagtgcatatgacaccatacaccaaaaaaccactgacactgtaaccgttcacctattgccaacggctggcaatccctttaaaaacgcaccgacatcgcatgcacaccgcatcgtcatgctcaagcttgccattacacccttgataaaaaaaggcatgaatatatcaattgatgagcgtgagctgtctttgatacctccgatatacaccatcgacaccatacgacagcttaagtccacttatcctgatgaccgattaatttttattattgggggcgatagtttggcaaatctacatcaatggagggcgtatgatgagctgatttaccaagtcaaattgtgggcatttgaccgtgtcgataccacgccagctgatgagacagtagcaacaaagtgcactactaatttggatgaatttttggcaaatgaccatacgatttatttagatcacacacccatcatgaacatctcgtccagtcaaatccgcaccctaatcgctgatggtcgcactaagcttgctgcaccgctgatggatgagtgcgtcttggcatatatctgcaaagaaggcttataccaaaacctcaaaaatatgcta

SEQ ID NO: 22 - DNA, 1200 bp, Moraxella catarrhalis
atgatgaatgaccagttattaaatttttatgccgaacagctgtctgctttaaaagcatcgcacaatcaccgccaattacaacgcttaaaacatcaagggcaacgcattggtgtcaatgacagcaagcctttgctcaatttagccagcaatgattatttgggcattgccagtcaagcatcactttatgaagaattcttagagctactgcatgaacagcgttggccgtttagtgcgtcttcttctagattattgacagggaattttgaaaattttgagcgattagagaccaaaatggcatcattatttggtcgcccttgcttattatttaatagtggttatcatgccaatatcggtatcttacctgccatttgtgatgacaaaacggtgattttggcggataaattggttcacgccagcatcattgatggaatgcaattggctgccaaacatggcaccaaaaccatccgctatcaacatcaaaatctcccccagcttgaaggattaatccaaaaatatcaatcagataatggcatttgtcgtatcattgtcgttaccgaaagtatttttagcatggatggcgatatcacaaatttatcccatcttagccatttaaaggcacaatacccaaaggtgatgctttatgttgatgaagcccacgccatcggtgttcgaggtgggcgtggtttgggctgtgtggaagaatatggcgtcatcaatcaagttgattttattgtcggtgcatttggaaaagcattggcatcagttggcggatactgtatttgccatcccattttgcgtgattatctgattaataaaatgcgtcctttgatttttagtaccgccttaccacccattaacattgcttggagctgttttattttagagcaaatacctttgatgaaccaaaggcgtaagcatctgatgaaacttagtgatgatttatcaaaagtggttcggctggcaaagctgccatgcccctctgccagtcaaatcattcccatcatattgggtgacaatactcgtacactaaatgccgccgctgatttgggcagacaaggttatcatgtgctggctgtacgcccaccaaccgtaccaaaaggacaatcacggttgcgaatttgtttaaatagtgctattaatgatgatacaatgataaagtttacccaagtgcttactcaaatcgtcagcagtgagagcaaa

SEQ ID NO: 23 - DNA, 2964 bp, Moraxella catarrhalis
atgcaaatcaataaagcatttggcataaaaagcgcttatgggcagctgattttgttggtattcttaccgattgtggtattggcatttttaggttcgtacttggtcatgagtgaggtacgccgtgccatactctcagaacaagacaccatggcaaatgcagcattggtacgttatgatgccatcgtgcgtcctttattaacagaccttcaacatcgccaaaatcgtttggatgagcgtgtcgctcagatgaatgaagatgagatattaattgccattacgccacatgataccaatttaccaaatcgtgcgatggctcgccatgctcaagatataccattttttaataccaattggttcgtacaacttcaacagtctcgtaatcagcatgtacttcgagtggcaattatggatggcatcggtcaggtgctttttagtacgggaatgcagacagatttatcttggggggatgttgatttacaagccaaagaaatctatcgcataccaaccgctgtaggcaccgcctatggcaaatcattcatttttgataatgagcgttattggcttttggtggatatggataatacaccattgacgattacctcatatcgagtagcattggcgttgactgccattggattgacgaccattttactgcttttgctgattttaaatatttattctaaacgctggattacgccactttatgagatgcggctgtacttacagcgactaaataccgataatttatcccgtgtaccacaactaaaaaccagtggtgaatttgccttattgcgagatgattttacacgagcggttcgccgcctgcatgccagctttacagaactaaaaaaccatgccgatgaaacagaacatgatttacagcaagcatttgatgaaatggaaatgcaaaatatctctattcgaaatgctcgtgatgcagcaatctcaaccagccaagccaagtcagcatttttagcaaatatcagtcatgagctgcgtacaccattaaatagcattgatggttttattaatttgttagcccgtaaaggtgagttgactggtgagcaaaatttatatgtacaaaccatcaaaaaatcatcagcacatttgctggcactggttaatgatgtgcttgatttttctaagattgaggcaggtaagctgattttagatagccatgattttgatttatatgatgcagtgtatgatgtggttgatatgctgtcaccagcagcacttgaaaagcggctgcgtctggcagtcttattttatgatgatgtaccaactcgcattattggcgatagtttaagagtaaagcaaatcttaaccaatcttgtgggtaatgccatcaaatttactgatatgggcagtgtcgtggttcgagtgagtttggctgaaaaaacaggatatttatgcattgaggtggaagatacaggcaaaggcattagtgaaagtgataaagaacagctgtttcaaagttttggtcaaggtgatttgagcgtcactcgccgctatggtggaacgggtttgggtttagttatctcaaagcagttgacacaattgatgggtggctcgattggttttattgacaatcgcagtgaaaatattgctaatgcaggtgcaactttttggtttgagatgcccatgggtgtggatgaaggttcgattgatgatgccttacctaagcttgcagagttgttgcacacacccatgcaacttttggtttggattaaccatgcaccagcattgcgggtactaaagagcagtttggttggcacaaaagttcaattaacgatagccattggtcttgcagatttattagaaaagcttgataaaaatgagatggattatgattgggtgattgtggataattttggccaagacgctgccaaagatgatgtgggtgccgtgttacgacaaattcgcttacgatatgatggtaagcttgccagttttggttatcaagtgggtatcaacgaacagttgttattgcgttatcagacccaagcattatatgagccgatggataaaaggcagctatatgccatgcttttaaatcagcaaaacctgtcggcgatacaatcacctcgtcaggccaaatttgtggggcgtaggattttggctgtagatgaccatttaccaaatcttttggtgctagatgcattacttgctgagcttggtgttgaggttgttacggcaaatagcggctttgaggccatcgaaaggatgacgcagagcatcacagggtcaacgccacccattgacatgatatttatggatgtccagatgccaagaatgtcaggacttgagacctctatcgaaattcgaaaaattgagcaagcacatttgagcaagcctgtacctattattgcattgactgcccatggtctgtcagatgaaaaagatcagttggtctcatcggggcttaatgattatgttagtaagccaatcggtgaggtacagctggtacaaacgctacaaaaatggcttggtcatgatgtggtagctgataaactcaatgtattggatatggttgaaagtttgcccatacttgatgtaccaaaaaatgccgtcgatgcccctgaaaaattacccgttgtagattggggcgatgcacttgagcgttcagcaaataagcctaagcttgcctatagactgcttgagatgctcattgatggtgctgactctgagcgtcagtcgcttgagcgtgcatgggcagaccgtgaccgtgtcagtttggctgatatcagccatcggatggttggggcagcacggtacgcaggcgtgccaagactgcgtgcggtttcagagatttttgagtcggcatgccgaaatgatatcacggcagtcactccaagccattttattgccttgcgtccagcatatcgggctttgattgatgcgctcgatacattgcaagcagtggagctagataaagtggcgatggatgcagatttggcagat

SEQ ID NO: 24 - DNA, 1731 bp, Moraxella catarrhalis
atgaccgaatcaaccacccaaaccactgacagcaccaccgaaaattttgtaccacagtttagtgacttgggacttaataagcccatcttaaaagcactgacaaaaagtggttataccacacccacgccaatccaagcaaaagccattccgcacgctctaaatggtcgtgatttgcttttgtcagcccaaactggctctggcaagacggcagcatttgttttacctgtcttggataaaatgagccgtaagccgaccattgaaaagcatgtacaagcacttatcctaacaccaacgcgtgagcttgcactacaagttcaagacagtgtacgacgctatggcgatggcatgcgtaatatgtttagcgtgcctttggtgggcggtgcaccttatggcggtcagttgcgtgccttaaaaaaaggcgtacaagtcatcatcgcaacgccaggccgcttgattgaccatatgcgtgaaggccgtgttgacttatcaaaactagatatgctgattttagatgaagcagatcgtatgcttgatatgggatttgcagatgatatcaaagaaattctacaaaatacgccccagacacgccaaaccgtgatgtcctcggcgacttgggatggtgcagttggtaaaattgctgaaagctttacggttaatcctgaaaaagtttctattaaagttgagtcagcacatatcgatgaaagtgtgtattattgtgatgattttaaccacaaaaataatatcttgcttcaagtattaaataaccctaaaattaagcaagcagtgatttttgcagccacaaaaatgtccacagaaaaattggcagcgcagcttgtcgaagcgggttttaaggcacgctatttgcacggtgatttgcctcaaggcaagcgaaatcgtatcgttagcgacatgaaatcgggcaaatgtgatttgttggtcgctactgatgttgctgcacggggcattgatatttcagccattagccatgtgataaattatgatttacctcgccaagttgaggattatgtgcatcgtattggtcgctgtggtcgggcaggtcgtactggcgtggcggtgaatttatgcagtatcgatgacaatcgtcagcttgagcatattaatcgttatctgaagcgacaaatgagcgtctcaaccatcgaaggattagagccacgccgtaattttggtatccaatcacaagagcgtcgccgtggtcgcagcaagtctcaaaaccgtactcgccaagatggtcgacaaaattttgagcgtactgatcataaatttggtagccgtaatcgccatgaacatcgtcatgagcgttcatttgagggtaagcgtgaacgatttgaggatcgtgaacgcagcgtcaatcgtcgtgaaaatgatgaaaatcatgagcgtcgtcatagtcgctctgatcgccgttttgataaaaacagacaaggttattatcaagctgatggcacagctcgccaagataaaaaagcgtatacacgcaattttgatcgccgtgacaacgatcgtaacgatactcgatttgataagcctaccaaaaaatttggcacacaaactgactttgatcgtccaagacgcaacaaagcatttggtgataaggtcaagccaaatacaggttttgataaatttggtggtaagtctcgtccaaaggcagttgaagagatcttttttgccaagcgacaagataaaaaagccaagcgtagatttggtgaattt

SEQ ID NO: 25 - DNA, 906 bp, Moraxella catarrhalis
atgccagaattacccgaagttgagacaacaaaattaagcctagagccattgattggtcaaactgtcacatgcgttcaagtcaggcatccacgcttacgctatgatattgccaaagatttggatagtttggttggctttgtcctaaccaaactacagcggcgtgctaaatatttactactggatttttatcacgcacatgacagtcgccaaaaaactttactgattcatttaggcatgtcgggcagcttacaacagcatatcaatgaaccaccccgcaagcacgatcatgtcttgattgactttgccgattctcatggtaaaatcattactctacattatcatgatcctagacgctttggcatgattctttgggtcgtcaatgatgattatatcgaccagccaaacacctacgcacgatttttggcacacttagggcccgagcctttgagcgaagattttgatgctaactatctcatcagatacatcatgcgtcccaaatctcatcaaaaacctttaaataaacccatcaaatcactgattatggatcagtccgtcgtggttggtgtgggcaatatttatgcagctgaaagtttgtttttgtcaggcattcatccgctcacgcctgcctatttggttcatgaagataagctggtacgattaactcatcacatcaaacaaatattagctcgtgccattacccaaggtggttcaacccttcgggattttacagttggcagtggtaagacgggttattttcagcaaaccttgctcgtctatggcaggcaaggggaatcgtgtgccacttgcggtagtttacttgaaaatatcaaaatcagtggtcgggcaagcgtctattgtccaaactgccaaccttatcatgatcacaataacccaagcagcaacaat

SEQ ID NO: 26 - DNA, 2394 bp, Moraxella catarrhalis
atgaaaatcagtgaaaattggctaagacagtgggcaaatccaagcattaatagtgagctacttggcgagcagttgaccatggcggggcttgagctggacggtgttgagactgttgcaccaccatttaatggtgtggtcatcggtgtggtcactgaatgtcagcagcacccagatgctgatcgcttgcgtgttactaaggttgatattggcagtggtgagcatttacaaatcgtctgcggtgcacccaatgtatgtgttgggctaaaagttgctgtggcaaccattggtgcggtgctgcccagtgatgataataagggttttaaaatcaaaaaaggtaagcttagaggtgttgaatcacaaggaatgctttgtggtgcttcagagctgggccttgaagatgagattgatggtttgatggagcttccaaaggatgccccaattggcatggatgtgcgtgattatttaaacttagatgcgaagatttttgaaattgctattacgcccaaccgtggggattgcttaagtgtattgggcttggcacgtgagattgctgccattaatcagatgccgctcaatcgtcctgtgatccaacctactaaggtggtcactgataccgctccgagtgtgcaagttttggatgccaaagcttgtcccagatatttggcacagcgtattgatgatattgatcgcacttggccaactccccaatggatgaccgacgctttgattgcttctggcgttcgaagccataattttttggtggatgtgaccaattttgtattacttgaattaggtcagccgctacatgcgtttgatgctgataaaattcaaggcgatatcatcgtgcgtatggcacactctggcgagacgcttgaattattaaacgaacaaatcattacactcagcggagatgagctggtgattgctgatgatgctggcgtattggcattggcaggcattatgggcggtgcacgctcagcggtcagtgatgagacaaccagcatcatactagaaagtgcacattttgatcggttgaccatctcagggcgtgcacgccgttttggactgcatacggatgcttctcagagatttgagcgtggtgtggattttgcgttgccaaagcttgccattgatcgtgctgttggtttgattgtttcggttgcaggtggtaaggttagtcaaatgacgactgccgagaatttagatgcattgcctgtcagacataagattattgtacctgtgggtaaggtatcacagcttttgggtgtagatataccatctgatcagatggtagatatgcttaatcgtcttgagattgtaaccaccatgcagcaagacagtttggtatgccaagtgcccagccaccgatttgatttaacaatttatcaagatatcgttgaagagattgctcgcatgtatggctatgccaatatttgtgcgaccttgccagagctttctgtggatatgcgatatgatgatacggcagatttggttcaattggttaagcgatctttggcaagctcaggttattacgaagcagtgagcttcagctttagcgatgctaaaattgaagcactgtttgatgatcaaagcctaggcgcggtattgccacttgccaatcccatctccagtgatcttgcggtgatgcgtcgtaccttaatgtcgagtctgttaccgattgttagttataatcttaatcgtcagcagccgcgtgtccgcttgtttgaaactggattaagcttcgttggcggtgatgttgagcatgtggttcagacaccaagcttggctatgattgcaacaggcgagctgaccactgagcaaagtcatgggacacgcaagatggatttttatgatctcaagcgtgatattgaaagcctgctgccaaatactttggataaatccaaagtgacttatgaacgcacgactttgactttcttgcatccaggccaaagtgctcatctgatgattgatggcgaagatttgggcttctttggtcagctacatccaagcatttgcaaagctttggacttgccaacagtgtgggtggctcaaatggatttggataagctgattgcacttaaccgaaaatcaagccccatcatagcaccaagtaaattcccatcagttcgtcgagatttggcagtgttggtggatcaagatgtcgcttggcaagcgcttgaaaaagacattcgcaaggcagcgggcaaatatttgcaagatgtttggctgtttgatatctatgtgggtgaaacattgcccaaaggcaaaaaatcgcttgcttttgcgatggtttttcaggatcaaaatgccacacttgaggacgagcaaatcaaagcagcggttgataaagtcattcaaaatttggcagataaacacgctgcccatctgcgagac

SEQ ID NO: 27 - DNA, 834 bp, Moraxella catarrhalis
atgagattaactcacaccaacacattgactcacttaactgcgtgggataatgtcatcagctctttggttgtggctttggcagcgtttgtcttatcaccccagcccattgcccacgccaaaactgacaccaatgccatggcaagcatcaaaggtggcacatatcgccctttatacttaagtgaagacagccccatggtgaccgtgggtaattttcacattgataaaacacccataactaaccaacaatttgccaaatttgtcgcaaataatcccaaatggcaaaaacaaaacatcgccaagctttttgctgaacctgactatttggctcactggcaaaaaacaagcaaaggctattatccaaactcagccgatattgataaacctgtggtgaatgtctcatggtatgccgccaacgcttattgtaaagcgcaaggcaaacgcttacctaagattgcagaatgggaatatgtcgcacaagcgtcaaccactcgcatcaatggcagccaagaaaaagggtataaccaaaccattttagactggtataccaaatctgccaccatgccattaaagcgtgtggcccaaagcccagccaactactggggtgtgtatgacatgcacggcttgatttgggaatggacacaagactttaacagcaatctggtgtcaggtgaatcacgagcagacagcacattaaaccaaaccatgttttgtggttctggtgcagcaggtgcacccgacccatcagattatgccgcttttatgcgttacggctttcgatcaagcttacaatctcaatttgccctaaaaagcttgggatttcgctgtgcaaaagat

SEQ ID NO: 28 - DNA, 2313 bp, Moraxella catarrhalis
atgtttcatccacctaatgacactatgaggagtatggcaatgggtgaatataaaaaacattggtgggggcttgtcattacactgattatcgccttcatcttattaggttggggcggttttgagatttaccgtaccaccccgcccattcctgataagttcgttgactcatcaggtcaaactttaatcacaaaacaagacattttagacggtcaatctgcttggcaatcaacaggtggtatgcagttgggttcagtctatggccacggtgcgtatcaagcccctgactggacagccgattggttgcatcgtgagctggtcgcatggcttaacatcaaagcccaagccgatcatggcaaggcgtttgatgagctgaccagcattgaaaaaatgggcttacaacaacagctcaaagaagagtaccgtggcagtagcatggggtcggacaacacagtgatgttatccgacactcgcatagcagcgattaaccaagttgcaccttattacattgatttatatggcgatactccagagcttgccagctctcgtgaaagttttgccatgaaaaataacacattgcctgatttgacggctcgtcaaaatctggctcatttttatttttggacagcgtggacatcgtccgccaaccgcccaggaacggttgccacttataccaacaactggccgcatgaacctttaattgataatgtgcctaccgctgaaaatgtgatgtggtccattgccagtgtggtgttcttattggcaggcattggtcttttgatttggggttgggcattcttgcacaaacaagaagaagatgacattaaagtaaccgtaccaaaacaagacccattaagcttaattgagctgacaccctcacaaaaagccttagccaaatacgcctttttggtggtggcgttgtttgtggtgcagatattcttagggggttttgtggctcactataccattgaaggtcaagacttttatggtattcctgtgtctgattttatcccttattctttggctcgtacttggcacattcaatctgccttgttctggattgccaccgcctttttggcaatcggtttgtttgttacgcccatcattcatggcggtaaagaccccaaatatcaaaagcttggggtggatttgttatgggtggcattaatcattgtggtggttggctcatacattggtcaataccttgccatcgctcacatcatgcctgctcatcttaacttttggtttggtcatcaaggctatgaatttattgatttagggcgtttttggcaaatcctaaaatgggttggggtgttgttctggctggtcttgatgttgcgtggtgtactggctggctttaaaggtgaaggcgataagaacctgttgttcatctttgttgcttctgtggtttgtgtgggcttattttatggctcaggcttattctacggcgaacataccccgattgccatcatggaatactggcgttggtgggtggtgcatttatgggtagaagggttctttgaagtctttgccaccgtgtccattgcctttattttttataacttaggtttggtgagcaaaaaaatcgccacaggctcttcaattgcgtcagctgccttgtttttattgggcggtgtgccggggacattccaccacttatatttcacaggcacaaccacgccaatcatggcaatcggtgcgtcatttagtgctttggaagtggtgcctttgattgtcttgggttatgaaggttatgaacactggtcaatgcaacgccatgccaaatggatggagcgtttaaaatggcccgtgctgtgctttgttgccgtggcattttggaacatgttgggtgcaggtgtgtttggctttatgattaacccacccatctcactgttttatctgcaaggtctgaacaccacgcctgtccacgctcacgcagctttatttggcgtgtatggcttcttggcattgggctttgtgctgttgattgtgcgttatttgcgtcctgaatatcgcttcagtgataaattgatgaaaactggcttttggggattaaaccttggtctgttactgatgatttttaccagcttgttgccaattggtatctatcaagcctatgcgtctatcaccgaaggcttgtggtatgccagaagtgaaggcttcttacaacaagactttttagaaacattgcgttgggtgcgtacctttggtgatgtggtctttatcatcggtggcgtgagcatcgctttacaggtggtcaaactggtatttggtcaatcgccaaaacacccaaaacatgacacgcccatcacagac

SEQ ID NO: 29 - DNA, 1749 bp, Moraxella catarrhalis
atgtcagtcaagtatcggctttgctttggtttttatatgacatataacctgactaaatcacccatgactccatcaaaaccttctcaagattctgccaattatttatttttggttctgccacgctttgcactactttgggtctgcgtggcactgattcccgtttcaattttatttcacatttggtggcttttgtttattgctacctgtttgacttgtcttggcgtgtataatatcagccaaaagcgtcatgcaattttgcgtaactatcccatcagtgggcatattcgctttttgtttgaaaattttcgcccagaggtacgccagtattttatcgagggtgaccgagaagaagtaccattttcacgcatgcagcgttcaatcgtatatcagcgtgctaaagatgttgatagtaccactgcttttggtagtctaaatgacttgaccaaacctggcacggattggtttttacattctggtcgtagccatacaattaaaaatcatgattttcgggtgcgtgttggtaatgaacgctgtcgacaaccatatgatttatcggtctttaacatctcagcaatgagctttggggcattgtccgcagcagcgattgaatcattaaataaaggtgccaaagaaggtgggtttgcacatgacacaggtgaggggagtattagtccttatcatcaaaaatacggcggtgatttgatttggcaattagggacagcgtattttggttgtcgtgatgacaaggggcgatttaaccccgagacatttcgtcaaagggcggtcttgtcgcaagttaagatgattgagattaaattatcacaaggtgctaagcctggtaaaggtggcgtcttgcctgcctcaaaaattaccactgaaattgcattgactcgtgatattccgatgggtatcgattgtatttcaccgcctactcacccagagtttagcacacccactgagcttgtgcatttttggcaacgcctgcgtgaactatctggcggaaaacctgtcggctttaagctttgtatcggtatgccgtgggagtttatggcaattgttaaagccatgattaaagaagataattaccctgattttattgtcattgacggagctgaaggcggaacaggtgcagcacccattgagtttatggattcggttgggatgcctttggtggacgcactgatttttgtccaaaatacgctggttggtgcaggtatccgtgacaaaatcaaggtaggcgtgagtggtaaggtgatttcaggatttgatattgcaagattgatgagtttgggtgctgattggtgcaattcagcgcgtgggtttatgtttgctgtaggctgtattcaatctcgttcatgccatacaaataaatgcccaacaggggttgccacccaagaccctgcacgccaaaaagccattgatattcctgataaatctcgccgtgtatctaattttcataaaaataccctaaaggcattggctgagattgttggttgtgcaggtctatctcacccaaccgaactaaaaccacatcacattgtacgccgacaaccagatggctggattaagctgttatctgagcattatcaattcatcgaaacaggttcgttgttaacgggtgattgtggtcgccgtgtgttagatgatatgtggaagcttgccgatccaaacagctttcaggcgatgacgattgcagataagattgttggtgctgaaaataaacgcaaccgcacgatagaaagtctgtat

SEQ ID NO: 30 - DNA, 1485 bp, Moraxella catarrhalis
atgatgtataacgaccaccaaaaaccaacccccaccaaagagcagttggcagcacttgatatggcaaaaactggacaatcctttaaaattgttgcctatgctggtgcaggtaaaactacgacacttaagctcatcagcgaaaatttgcgtggtcgtgggctgtatttggcatttaataaagccattgctcatgatgcacaaaataaatttccgcccaacattcgttgccaaacttttcattcgctggcttttcgccatgtcaatcgtgatgtgactgccaaaattagcctgcctaggcttacgccatctcgcttagccaatgaacttggactgcgtgccatcagcaccgagcgggtcattgatggcattaaaaagccagtgacgctcacgcctgccaagcttgctaatatcgtcagtgaagccatcacgaccttttgtaagacctcttctgcgtatcctgcaccacgacatatcaccgcaccaaattggatgagtgatactgatgctaagatgttgcaacaaactttatatcctgcttttgaacagcgttggctacaatccattgacccacgccatcaagcaggcatcagccatgatatttatctaaaattgtggacgctgtctgatcccatcattcctgctgatttcattttatttgacgaagctcaagatgccgaccctttaatgatgggtgctttgattcgccaagataaacaaaccatctatgttggcgatgctcatcaacaaatctatgaatggcgtggtgctctaaacgccatgaaacgcctgccctatccacagacactattgacgcagtcgtttcgttttggtgaaccgattgccagaattgccaatgtgtttttaaaagcactcaatgaaaacattcccttaaagggcaatcccaatcaatcttcaatcttagccaaaagtttggttcatggtgcaaaagatgccatcttatgccgcacaaatgccactgccatgagccatttgcttgatggtctaaagcttgggcataaggttgctctgcaggctgatagtcatcgaattttaagattttgtcaaggtgctgacagccttagaaatggcaaatctgcctctggcatccctgaacttgcctactttaatcactggcaggaagttcaagaatttagtgaaactggtgagggtggggatttaaaaacttgggtgaagctcatcgaagaacatggcacgaccaccatcaccaaggcgattaatagcctgaccatgccaagtcatgccgactatgtcgtctcaactgcccacaaatctaaaggccttgaatggaatcgtgtacaaatcagcgatgattttttatatgacatcaactcattggctgttaaaattacgcctgaagagttacgcctattgtatgtggcttgtacacgaggcaaaaacctgttagacattcatcacatcagcgatctgttgcatgctctacaacacaaaaagttgattctggga

SEQ ID NO: 31 - DNA, 969 bp, Moraxella catarrhalis
atgcaaaagacacacttatttaataatcctgttcgcctacttgcaccgatggaagggctgaccgatccgttaatgcgtcgtgtcctaacccaaattgcgtatgatttgggttcaccttatgattgggctgtcagtgaatttattcgagttacgcactacccgctgcctgctcatgttttttataaatatgtcccagagctacacaccaaaggctgcactgccagcggcacgcctgtacatgtacagcttttgggcaacaaccctgaaaccatggcagccagtgctttggtggcggttagtttgggggctaaagccattgaccttaactttggttgtcctgccaaaaccgtgaacaatcataaaggcggctcggttttacttgaagaacccaaaacactatacaccatcattcgtacggtgcgtgacgcaataccaactcaaattccagtttctgctaaaattcgccttggttatactgataccagtcaatcagctgagattggccatgcggtggcggatgctcgtgcagattggctaacggttcatgcacgcaccaaagtcgatggctataagccacctgcttactgggaaaaaattgcaccttttaatgacttaggattacccatcattgccaatggtgagatttggaatgctgagcatgccagacgctgcatcgctcaatcacaaacccatcatctcatgctcgggcgtggagcggtcactcgccctgacttaacagccatcatcgcaggtaagtctgatttgggttgggcagacctatgtcagcatcaactaagctttattaatgatatcactgataaccaaaacggtcttattggacgctataaacagtggcttgcgatgctcaccaaaggctacactcaagcacatcagctatggcaagcggtcaaaaaactcaaaaataaaagtgatattgagcaattaattatccaaagtactcatcaccat

SEQ ID NO: 32 - DNA, 3942 bp, Moraxella catarrhalis
atgatgagcaccatcgcaggcttggagtttttgacagattttcaagcacaaaaattagccgaccaactcaaacaaaaagctgggctaaatatttacaccttgagcagtcagcaagtttatgtgtttgatacaccgctgtcagaatctgaccatcaaaaggcgattgatttattaaaccaaggtcaaacgcctagcctaaacacagctgatgatgcacagattcaagtggtggttgcacctcgttttgggacaatcagcccttgggcatctaaagcaacagatatttttaataactgtggtgtcactattgggcgagttgagcgtgtcattgtgtatacacttacaggcgagaatttgcccaagcgtttgcctgccatcgctgaatcaattttacatgaccgtatgacccaaagccttgtctatgagctatcggatgtgtcggttttgtttgttgatggcgaacctgcccacttgagcgtggttgatattttgggtatgggtaaagatgctttagtgcaagcaaatgctgaatatggttttgcattatccgaccaagatatgacatatttggtggaaaatttcaccaagttgggtcgtaatccaacagatgttgagttgatgatgtttgctcaagccaattcagagcattgccgtcataaaatctttaatgctgaatggacggtagatggcgaggtgcagcctaagtctttatttaagatgattcgcaacacgcatgaacaaaatccagagggtattttatcggcttataaagataatgccgctgtcatggagggttttgtggcagagcgtttttatcccaccaaaacgaccgaaggcaatgcccaatatgggtttcatcaagagcaaattgacatcttgatgaaggttgaaacccataatcacccaaccgccattgccccatttgcaggtgcagcaacgggtgcaggtggtgagattcgtgatgagggtgcaacaggtcgtggcggtaagcctaaagcaggtttgacaggatttagtgtttcgcatttacatctaccgacgatgcctgaaaaatgggaaacaacagggcaggtatcggccgtcagttatggcaagccttctcgtatggcatcggcactggatattatgattgaagggccgttgggtggtgcagcatttgccaatgagttcggtcgccctaatttaaatggttattttcgtacctttcagctagatatctctgatcatcaagatggtagccaaatgcgtggttatcacaagcctattatgattgcaggtggctatggtaacatcaagcgtgacttggttcaaaaaaatgccatccaagagggggatttgttgattgtattgggtggacctgccatgcagattggtttgggtggcggtgctgccagttcggttgatagtggtaaacttgatgagggcttagattttgcttctgtacagcgtgataatgctgagatggaacgccgttgtcaagaggtgattgatacctgctgggcgatgaccaaagatggtatggatgccaacccaatcatctcaatccatgatgtcggtgctggcggattgtccaacgccatgccagagctggtcgatgatcatgaacttggggcacatctgaatttacgcaaagtcccttcgcttgaggcaggtatgtcacccatggcaatttggtcaaatgaagcacaagagcgttatgtgcttgccattcgccctgaaagtgaggcactgtttgacagcatttgtagccgtgagcgttgcccttatgccattttaggcacagcaaccacagtgcgtcaactgatcgttgatgatagcttgcttccagagcgtcctgtggatatgccgatgcaggttttattgggcggcacccccaaaatgaagcgaagctttaatcgtaccgaattcgcccttaagcccttagatacagcttcggtgaatatcaaagacagcattaaagatgtgttgcgtcatcccacagttgccagcaagtcttttttaatctctatcggcgaccgctcgattacaggtatggttacccaagatcaatatgttggtcgttatcaggtacctgtcgcagattgtgcagtcacgagtaccgccttaaatgctatcacaggcgaggccatggcaatgggtgagcgtgcacctgttgcactcatcaacccagcagcttctgcacgcttagcagtcgctgaagcggtgacgaatattgcctcagcccgcattgataaaatcagcgacattactttgtctgccaactggatggccgcttgtggcgatgaaaaagaagatgcggcattatttgatgcggttcatgctgtgggcgaagagctatgcccagcacttggtattgccattccagtgggcaaagacagcttatcgatgaaagcagtttggagcgaagatggtgttgaaaaatcagttacctcaccgatgagtctgattattacagcctttgcccctgttcaagatgtgtcaggtacactcaccgccgccttaaataataccgattcggcattgtatcgcattgacttgtcatcaggtaaattgcgtttgggtggctcaattttggcgcaaacattaaatcagctgggctgtgattgtccagatttggagcgaccagaggatttggccaatttctttgcttttattcaggcggcagcaaaagcaggcgtcattcaagcttatcatgacattggtgatggtggtttaattgcttcggtggcagagatgcagtttgccagccgtatggcgattacccttgcactgagtgatgaaaatttgctcggtcagttatttgctgaggagctgggtgctgtggttcaagtattgcctgatgatgtgccagcatttgttgatttggccaaaacgcatggcgttagtgagtttgtcagcttaattggtcaagccaaaacaaccccagcaggcggtgctggtcttgatgtgttaagcattaccacaccaagtcagacattgtcttttactcgtagcgagcttcaaaaacagtggacaaaagttagccatgccatccaaagtttgcgtgataatccaatctgtgccgatcaagagtttgctttaattgatgatattaatcatcatggcttgattgccgatgccaattatgatttggatttggcggtagaagctccctatgtcaatagccgtactacccagccaaaagttgccatcttgcgtgagcagggcgttaatggacatctagagatgggtgcaggttttgtgcgtgcaggttttgatgccatcgatgtgcatatgagcgatctgatgagtgggcgaattaacctgcgtgattttgagggtttggtggcatgtggcggttttagttatggtgatgtgctgggtgcaggttctggctgggcaaactcaatattatttcatgatgaactgcggatgcagtttgccagattcttccatcgccccgaaacttttgccctaggcgtctgtaatggctgccagatgatgagccagctaaaagacttgatggttggtgctgagagtttccctcgttttattgccaataaatctgctcgttttgaggcgcgcacagtgaatgtacggattgagcgtaccaaatctgtattactcaaagggatgcaagacagcatcctgcctgtcgctattgcccacggtgagggctatgctaatttagatgataaatcgatggcagatctaacttatcatggtcaaatcgcacttcgctatgttgatagccaaggcaatccaactgagcattatccactaaaccccaatggctcaccacagggtattacgggcatttgtagtaatgatggccgtgttactttaatgatgccacatcctgagcgtaccctacgcgccgtaaatcattcttggaagcccgacgaatgggtcaatgatggtgcatggatgcgattattccgtaatgcacgcgcatttttgcgt

SEQ ID NO: 33 - DNA, 1413 bp, Moraxella catarrhalis
gtgacatcattagcaaagcttgacggtgaagaggtggtggcatttagtatcatacgctcaaaaggtgcaagcgagacctccgtggtggccgcagttgatgatgccttggctgacttacaggctcaaatgactgacctgaaaatcgaaaaaatcgttgattacgctgcacccattgaagaaagctatcaagcaacgatgcgtatgttgattgaaggctgtattttagcggtgattgtggtatttatctttttaagagattggcgagccacttttgtggcagccacggcattgccattgtctattattccaactttttttatcatgtatttgtttggttttagcttaaacatgatttcgctgttggcattgactttggtgatcggtgttttggtggatgatgcgattgtggagattgaaaatattgttcgccatcttaatatgggcaaatcccccatgcaagctgccattgaggcggctgatgagattgggcttgcagtcgttgcaacaacttttacgctgattgcggtatttttgccaacggcatttatgagcggggttgtggggcagttttttagccaatttggttggacagcggttattgcaatttttatttcactgttggttgcccgcctgctgacaccgatgatggcagcatatattttacgcccatccatttacacccaaaaacctgctggtaaattgatgacagcttatcttcagatggtcgcttggacgctaaagcatcgtaccatgacagtcgcctttgcatcgggattttttattgcctcgctgatgttggcatcttttttgccatcggcatttattccacctgatgagatgaaccaaacccaagttagcattgagctgacacctgatgcaacctttgatgatacgctgcgtatcgcccaaatggcggtcaataaagtcaaagcagtcaagggagttgaaagcgtcttattaacagtaggttcatcacacagctcgggcgacccaagtagtatgcgtagtgcatcagtcaataccgcaaagcttgatgttaagcttgccgagcgtaccatgcgtgcaaccaaaacacagattgaatcagatattaatcaagcactgttggccgtaccagcggcacgctttaatgttggcatgtcagcaggtggcggtgaggcgggctatgttttttcgatcacaggtgctgatgcaaaaaaacttgatgccaccgctcatgagatcatcagacaaatccgtgtcttaccgatggtggcaagtgtgattaataacaatgcctttcccagacctgagctgtcagttattcctgatgagctgagcatggcggataaaggtgtcacaacggcagacttggtaaatacattgcgtgttgctacccaaggtgattatgataatgccttacaaagcttagcc

SEQ ID NO: 34 - DNA, 2106 bp, Moraxella catarrhalis
atggataaatttatgaccaagcccgtcatgaccattcatttgcctgtgactgcactgtctggtgtgggtcaggcactggctgggcgattggccgagcttggcattcatcgtatttttgatatgcttttgcacctgccacgagattatgaagatcgtagccgtgtcattgctatcaaggatgtcagtcatggtatgagtgtgttggtggcgggtgttgtgacttgggttgaaaagaatcgcacaggattatcggtgaccttagaagatgccacaggggagattacgcttcggttttttcatacttatccaagtctattaaccacaatgatggtgggggcaaaaatcaccgtatttggtgagataaaggttagtcgctacggtacacagatgtctcatcctgactatcatctgacaggcacaaaaaagtttgaatctgggcttttgcccatttatcccaccatcaaaggcatcaatcaaaataaacttaggcagctggtgcgtctggcactgacagctgttcagcaagatggcattcatggcttatcagaaacacagctaaaagcagcaggcgttgagttgacgggcgatctattgccagcattaaaagcggttcacctgccagagatacatgctgatatttttagccaaactgctttactggcaggacttaaagatcgtactcaccctgcctgtcgccgtattatcatcgaagagctggtggcacatcaggtcagttttttgtttcggcgtaatcatatttatcagtataaagcacccaaatgcgacccaattagcccgcttgccaagcaactggtggcaggtctaccctttgagctgaccgccgcccaaaagcgagtcattgatgaggcggtgtctgatatggcgacatcacgccccatgctcagacttatccaaggcgatgtcggtgctggtaagacgctggtggctgcgatgacagcatgctatgccttagatagtggttggcaggtggcagttatggcaccaacagaaatcttagcagagcaacatttgataaattttcaaaagtggtttgaacctttggggattggggtcgggtggcttgcgggcaaacaaaccgccaaagagcgtacagcagcactagatgccatcagaaaaaatcaggtgcaaattgtggttggtacccatgcactgttttcagatacggttgtttttgccaaattggggcttgtcatcatcgatgagcagcaccgatttggggtagagcagcgtctgcgtttaaccaataaaggcgtgtcaggtggagcaccgcatcagctggcgatgaccgccacgcccattccaaggacacttgctatgagtatgtacggtgatatggatgttagtattattgatgaattaccgcccaagcgtacgccaatcaccacagtgacgattaaccgagatcgacgagacgaggtgattgagcgtatacaaaataactgccaagctggcaagcaagcgtattgggtgtgtccactggttgaggagtcgtcggctttggatgtgcagtcagcccagctgacttatgaggatttaagcgatcggcttgatattcgtacagggcttatacatggcaagatgaaagctgccgacaaacaggcggtgatgcaagcttttaaggcaggcgatatagatttactcatcgccacaaccgtgatcgaggtgggtgtggatgtgcccaatgcgtcattgatggtgatcgaaaatgccgaacgcttaggattgtcccagttgcatcagctaagagggcgtgttgggcgtggatctgccaaaagcttttgtgtgttactgtatcagctgccattatcaccaacaggcattgagcgacttaatgtactcaaagacagcaccgatggctttgtcattgcccaaaaggatttggagctaagaggtgcaggtgagcttttgggtaaacgccaaactggagacatgggttattatttggcggatattgtgcgtgatgaggcactgcttgaggcagcaggtgacattgcatgccaattaatcaaaacttctgataaactgccaacagcattggcaatcatgaatacttggctaccggaatctaaagattatgtcaatgtt

SEQ ID NO: 35 - DNA, 264 bp, Moraxella catarrhalis
atggctcaacacgcactttatcaccaaccgaaacgctgcctgattcgatacgaccttgatagccacgaaaatcatcttttttgtcgccatcagcacgcaacacatactgcactggcaaatgaaacgctgccgtatccgtcaaaaccgcttcccccacaggcaaactctccaatatctcaagtaatgtaccaccttgataccatggtatattttggctcttatggacgatattatcaccatttagggcagaaacaggcacaaatt

SEQ ID NO: 36 - DNA, 1170 bp, Moraxella catarrhalis
atgacaactctaagtccaaaagatgtagtaatcgttgatggtgtgcgtacggcaatgggtaaaaccaaaaatggtatgtttcgccatgtgcgtgccgatgatttgtcagccaagctgattcaggcactgattgcacgcaatgacattgatccaagcgagcttgaagatgtgatttggggatgcgtgaaccaaacacttgaacaaggctggaatattgctcgttatgcagccttattggcaggcgtgccaaaaactgtggcagctcagactgtgaaccgtttgtgtggttcatccatgcaggcgttacataccgctgccgctcagattatgaccaatcaaggcgatatgtttatcatcggtggtgtggagcatatggggcatgtgtcaatgatgcatggcgttgacccaaacccaaaggcgtctaaacactatgccaaagcatcaaatatgatgggtctgaccgccgagatgctaggtcggttaaacggtatcacccgtgaagagcaagatacctttggggtgcattcgcataaaaaagcatgggcagccacccaagcaggccgttttgataatgaaattgttggcgtagaaggacatgattctgaaggtaatctgcagttatgcactgtcgatgaggtgattcgtcctgatgctaatttagaggcattccaagcacttagacctgtatttgaccccaaaaatggtacagttactgcaggcacagcctcggcactgtcagatggtgcttcagcaatgcttatcatgtcagcccaaaaagccaaagatttggggttaaaacctcgtgcacgcatccgtggcatggcggtggcaggatgtgatgctgcaatcatgggttacggtcctgtgcctgctacccaaaaatccttaaagcgtgctggtcttaatctgtctgatatccaaaccattgagctaaatgaagcgtttgctgctcaaggtctatcggtactcaaaggcttggatttacttgacaagcaagatatcgtcaatcataatggtggtgcaattgcgttgggtcatccgcttggctgctctggcgctcgtatcacaaccacgctgttaaatgtcatggagcaacaagatactcagctggggcttgcgaccatgtgtattggcttaggtcagggtatctcaaccatcattgagcgtatc

SEQ ID NO: 37 - DNA, 2685 bp, Moraxella catarrhalis
atgaaactcaataaactagccgctattatcagtgctggcatatcgtgtgcgtacctgacccaatgcacttctgttcatcaaatggcaacatttggcaccaaaaccatcgataatgaagcagctttacaagatactaagccgcccactaacggtgtttatacttatcctgtaacacgcattcatcaagacagtacggattattttttaagtggcgaatatggcagatcagctgaccatgtgcgatctgaaggtgagtttggcgactcttcagcataccctcgtcccgatgatggcgtcagtcgctactttggtgaaaaaattgttgataagtttcgttggcttgaaaatgtcgatgatatgaataaagactacacccaagaaactgatgaagatcgtgatcgcaatctgattggttcgttgcttgaaaatgatgtgaaagatgggttgtttgataaccgcacacgcaaagatttacagacggttaagccaaaacaatcaagcgaggttaatgattgggtaaatgctcaaaatgaggtaaccaatcagtattttgatgccaacccaatctatgagcaagtcaaaaacaatattaacgctttgatgagctaccgctatagctaccgtaaagaaaataaagatggcgtaggcagtcttgaattataccgtcatgaagacggctatatccgccttgagttgacagacactgatggcaataagcgcaccttattcaatgaaagagagctttcagaagatggtaataccgttttgccgtggccagatatttatgtcagcgataaaggctcttatgttgcctatgtcaccgcccctggtaataatgatacagacacccgaggacgcacagatttacatgtcatcgatatcaaaacaggtaaagctgccattgagccgattcaaaatgctgacaataacagcattatttggctagatgataagagctttttgtacattcaaggctcacaaatcaaacgccatgaagttggtagcaaaaaatgggttgatcccattgaggtgacttggggtgagatcgatggtgcaggtccaacggatatgtggtacagcgatgatgaaaccagacggtatttagtcattgaagcatataaaaaagcaccgactagcttcatcaaagacaccaaaactaataaggtatatcgtattcacagcgaaaaattctttaatgactttttctatcacgcacctgattatactcacgcaccgttagcctctttggtacattttgatgataaaacgctggatgtttacttcatctcaggtgaaaaaaatatcaagggtgatattttcaaaatgaacctaaacaatcctaaaaagcgtgagattgtggttgctatccctgatgagtatgatgaaaccttagaggcgatttatcaccctgaagcaggcggtcattttttgattaaatatctaaaagatggcgcacacaagctgatattaaccgatacaacgggcaagattgttaaagatttgacacctgacataccaggtaatgcggacgatttaaccagctatgttgcagaagatgacaacaaggatggggataaaaaagcaaaagataaagaggtagccgatgaggatgatcaaacccctgatgaaagctatgtgtcttttcgctttaatgccatcattaagcctcgtacggtttataaatacagcccatcaaagggcgagtttattgatgtgcgtcgtcgagatttgattccttttgatgaaaatctttatgaaagtaaacaaatactttacacctcaaaagatggtaccaaagtaccgatgaatatcaattataaaaaagggattaaacttgatggtaaaaacccaaccgtattgtatggttatggtgggtttggggctactgaaaatcttgcctttcataaaagcaaagccgcttggcttgagcatggtggtgtgtgggcaactgcctttatccgtggtggcagtgaatatggccatacatggcataaggatggccgcctgctcaataaaatgaatgtctttgatgattttgcagctgcggctgattatttggcacaatcaggctatgctgatagcaatcatttggcaatctctggcgcgtcaaatggtgggctgttggtgggtgcttctatggtcttgcatcctgaaaaattccgtgtcgccataccagcggcaggcgtgcttgatatgttgcgttataacgataatttccatacccaatattgggcaggtgagtatggtttgccctatgacagtgttgcacaatacaagcttttaaaaagctattcgccttatcataatgtcaaggcaggtgtctgttatccatcaacattggtgatgacctccaagcgtgatgatagggtgacgccttcgcattcttataagtttgttgcagctttgcaagataagcaggtgtgtgctaacccaactttcttatatgcagctgagcagtttggtcactgggcaaatacttatcaagagcaaaaaaatgactacagtctgtttacaagttttgcactcaatgaaatgaatatcaaacatgtaccagacctaactcatcgccatgatgctgatttttataaaactgataaatggcgtgaagaagaggccaaagagcatgctaaacagattaaaaaactgcaacagcggattgataagctcaatgaaactaaggataaa

SEQ ID NO: 38 - DNA, 1215 bp, Moraxella catarrhalis
atgaaaaaaacttccacacagcttgggctacttgccgtcagcgtttcgttgattatggcaagtttacctgcacatgctgtttatcttgaccgtaacttaagagatggtctgaaatttggtatcagtggttctgtcaatcccagccttagcgtcaattcaagcacttttacttatttgggtgactcatcagtatatggcaataatgccactttagagcgtatgctacaagaccaagacagacaagacagtgatgagcgagcaagactcaatggatttggtggtgcttctgtttatctgggtgcccaaaaatacctaactcgggatattactttatttggtaatgttggtttgtatgcaccagcaagcaaaggtcaaagagctgcatatggctatggcgtgaatcttgccaccaaatatggcagtatcggtattaatactgataatgaatttagtgctggtgctggtacgcccagcggaatttataatttggttgatggctcaaacgagtacagcactgccatatcagttagcaccagctatatccctaagtttaagtttactgcataccatgcactacctggctcacctgatacacggtcggtaagtagccatgaaaactactatatccaaaaagcacaaggtctttctgcatcttatagccatcctattagcccaaatcaaaccctatctattggcacagcttatagcaaaagccaaaggcacaaagatttttttagtgataccgcctataacaacaaaacagcatccactgtggggctaagttaccgccaaggagattggagtgttagcggtaatgttggtcaagccaaagaaaatttacacggtgcgatcattgatgatattaccacaaaagcttttgggacaaaaattagctacaaagtaaccccaagaatttctgtttctgggacttacggacaaaaaactaccgacaaaaataccaagcccaacaaacgcttggatataccaaatatcatcgcacaacgaggaggcaatatttcaagccgtgtgcatgaaagttggttttttgataaaaccaaacaaaaaacctatggtctgagtgcaagttattatatctatggtggcatatcgatttctgcttcgatgaaccaaacacgcaccacaaactttaccgaagagggtgcgtatagccagcgtaaaaataacagctatcgcatttcaactggcttttcattt

SEQ ID NO: 39 - DNA, 2739 bp, Moraxella catarrhalis
atgataaaaaaaccacttgtttgtgcgatatcggccacctttgcgatgccagcggtagcagataataccaagctgggtgaagagccaaccaccaccttaaagggtgtattggtaagctcgcaaacgaaccaaaatacaggttttgtatctaatgattcaaaacaatccagtgatcttacgctttcaaaagataaattaaaatatcgttcggcaaccttgggcaatgcgttaagtggtgagcttggtattcatagtaacccttttggtggcggttcatctgcacctgttgtgcgagggcaagagggtgtgcgtcttaagattttacaaaatggaactgatgtgattgatgtgtcatcaatatcgcctgatcatgttgtggcgaccgatacacttttagcgtctaaagttgagcttgttcgtggtgctgatacgctgttatatggcttggcatcgccagctggtgtgattaatgttgttgatgaccgtatcccgaatcgtatgcctagtggtgctatccatgacaaaatcgaaggcgagacgatgcttcgatataacacaaacaaccatgaaaagcttgcaactgcaggggtgagctttggggtaggagatcgcattgcggttcgggtggagggcttaaagcgagaggctgatgactatcaagttccccattttcaggcagatcgcatgttagattatgtgccaggtagtgcaaataactctaccgttggcatgattggcgtgtcttatattcatgataatgggcatatcggtgcttcttatagccaccgtaaagatcgttatggtatcccagggcatatccactgcgacagccaacgagagcattttatcaaatggcataatatcacaaaatccaattattatttacccatttatcctcatttgatggaggattcagatattgatgacaatcctcatacgcattgccgccacaaccacgaagaccatatcggtgagcataatcccacgggcgtgcccatcaatcatgaacatcattcgccttggattgatatgaaaaccaatcgctacgacattcgtggcgaggtatatcggcctattcaaggtttggataaaattaagctaagcttaacttatgcagattattatcatgatgaaaaagatgctggcaatgagcaagacccaaacaatcacaaaccttctgagcgtgatacaacggtggataagggtcatgccagctctatttttacaaaaaaaggcgttaatggtcgcttggagttatatcatacaccgaccaaacgcttatctggggtattgggtattgggtatcaaacccaaaaatctgcagcaggagaggcgtatttgccaagctattttcaatcagaagcagaatggcaaaaagcccaaagtcaaaacattaaccaatatcgtccttacttattagttccaaataccaataaaagccttggtatttttggacttgagcaactaaagctaaatcaaatgacttttaaggtggcgatgcgtcatgaaagacaaaaaacaccaattgaatatgaccagcatttacttgaccatgctttgcagtattttttaagtaaagcacagctaaaagcacctgatcatcctgatttgacgacatataaacaacatgccacctcttatgctggtagtgccttatgggatattacgccaaatcatcgattgtcattgacctactcacataacgaacgcattccatcaccgatggagctgtattatcaaggagggcatttggcgaccagctcttttgagcatggcaataaaaacttggtcaaagaaaaatcggataattatgagctgggttttatgcatacagcagataaagtcagctataaagcaagcacttactatagcaattttgataattatatctttaatgagaccgttgccaaagaaggaaatttatacatcagacgctataatcagacgacagctaagttttatggtgtggagggttcattaacttaccagccaaatgccaatcacagtgtgatgttttttggtgatatggtgcaaggtaaaattggtgcattatctgatattaaaggtaagcttgtatatgctggcagaaagtgggtttattttgatgatgatatcaaggatatgaccgttgatgataatggtgattatgatgccgatggtggtttgacttgtgccttaaaaacgcctgaacaatggggacaaattaacgataataatgattgtagtacaaccattaatgtctataaaaacggtacaacaacctcaggcgaggaggattacgaccgtttggcacgcaacccaacttacgcacccagagtaccgcccagccgcttgggcattcgttggcaaggacattttggcgaccattggtctgccaatgcagaatttaaccatgtgtttgcacaaaataaagttgccacctcaacggttgccattaaacctcaattcaagcagccagaaggttgccaacgccatgagagtcattgccgaatcagcgactatggcagtgataacaaccctttgatgatgcagccaagatatatcacagaaaacaaaacggcagggtataatttgctcaatgttggcttagattataacaatgcatatcgtaatgttgattatacgctgtcaattcgtgcgaataatttacttaatgaacaaatctacattcacaactcatttttgccgtttgtaccgcagatggggcgtaatctgactttaggtttgacggctaaattt

SEQ ID NO: 40 - DNA, 2853 bp, Moraxella catarrhalis
atgacaaacagtagtaaagatacggtggcctttgcaaacaccgaattggcggcagacagtgcagcctatgtcgaagcactgtatgaacaatatatggcagacagccaaagtgtgagcaaagagtggcaagattattttgctacttatcgtcaagatgatgatgcaccacacaatgcaatcaaagagcagtttttattgttggcacgcaaccaatcaggattgaccgcaaaatcaagcgactcatctgtcgagcatcatcctaaacaaatggcggtgcaggcattaatttctgcctatcgtcgccgtggtcatcgcaaggcaaatcttgatccattggggctacatccgcgtccagaggttgaggatttgactttggcatttcatgggttggcggagtcagatttggacaccacatttccaaccaatgatttggcgattgggaaatcagaagctaaattgcgtgaaattatcgaaatcttagagcgtgtgtattgccaaagcattggttatgaatatatgcatgtttttcagggggttgaaaagcgttggatcgaaaattatatcgagtcaaatcacggccatatcaaatttgacaaagataaaaaattagaaattctagagcgtctaacagcggctgaaggtttggagaaatacttagctcgtaaatatacaggtgtcaagcgttttggcctagaaggtggcgaaagcttcattcctgcagtgcatgagatggtacaacgcgcaggtactcatggctcaaaagaggttgtcattggtatggcacaccgtggccgtttgaatcttttggtcaatattttgggcaaaaaaccaagcgatttgtttgatgaatttgatggtaaagtgcagcctgttaatggttcaggggatgtaaaatatcacaatggtttttcatctaatgtcatgacaccaggcggtgagatgcacttagcattggcatttaacccatcacaccttgagattgtctctcccgtgcttcaaggttcggtaagagcacgccaagcacgccgttctgaaaaatatggcttacaaattgataacagtacggttttgcctttggtggtgcatggagatgccgcactggcaggtcagggtgttaaccaagagactttccaaatgtctcaaacacgcgcctataagactggcggtacggttcatattgtcatcaataaccaagttggctttaccacttctcgtattgaagacgctcgctcgacagagtattgtactgatgttgccaaaatggttcatgcaccgattttgcatgtcaatggcgatgaccctgaagcggtcgtatttgcctctcaattggctgtggattaccgccgtgaatttggcaaagatgttatgctagatattttctgttatcgccgtaatggtcataacgaatctgacgagccatctgccacgcagcctttgatgtatgcagtcatcaaaaaactaccgaccacgcgcgcccaatatgttgagcaattggttcaagagggcatcatcactcatgagcagggtgccaagcttgaagatgactatcgtgaactattggatcgtggtgagtttgttgcaggcggtttggtcagcgagccaaatactgaactgttcgttgattggaagccttatttaggtcacgatttgcaagacgactgggaaacgggcgtcgatatcgaaaagctcaaatcctatggtcgtgcgatggcaaaaatccctgaagggtttaccctgcagcgtcaagtggcgaaagtcgttgagcagcgtttggcgatgcaaactggtgaagaacctcttaactggggcgctgctgagactttggcatatgctagccttgctgctgaaggttcattggtgcgtattacaggcgaggatgtcggtcgtggcacattctcacatcgtcattcagaactgtataatatgaatgatggcagtatgtatattcctctgcaacatatcaccaaagaccaagcacgctttgccacttataattcactgctatcagaagaggcggtattggcttttgaatatggctatgccaccacagtgccgaatgcattgattatttgggaagcacagtttggcgactttgtgaacggtgcacaggtggtgatcgatcagtttatttcatctggcgaaaccaaatggcagcgtgtttgtggtttgacgatgcttttacctcatggttttgagggtcaaggtcctgagcattcatcagcgcgtctggagcgtttcttgcagctgtgtgctgaggataatatgcaggtcattacgccaacaacgccagcacagattttccatgccttacgccgtcaggtagtacgcccaatccgcaaaccattgattgtgatgtcgcctaagagcttgctcagacatccacttgcaacctctaatttagaagaattggcatcgggcaaatttgaaactgtcttgcctgaaattgattcaatcaatcatgagcaggtgacacgcttggtactttgtggcggtaaagtgtattatgatttgcttgatcagcgtcgcaaactgggtcaagagcatatcgccattgttcgtattgagcagctgtatccgttgcctgaagaacgcatcttggctgaaattgacaagtatccaaacttagaagaaatcatgtgggcacaagaagagccactaaatcaaggtgcttggtattacttagcacctgagctattccgcatggtagtacctgcaccgacgaaggcaaaaatcattacaccttcggcgcgtcctgccgccgctgcacctgcgacaggctcaccaaaactgcacaccgaacaacaaaaagctttgattgctgaagccttgggtgtgacagtggaagccttgaag

SEQ ID NO: 41 - DNA, 1869 bp, Moraxella catarrhalis
atgcaatcattaggaattaacatggcaacaaaccaagataacacaattaataatatcccaacgctaaactttgatgccgtcatcgttggcggtggtggttcaggcatgcgtgcgtcattgcaattagtcaatggtggtatgaaagtcgctgtcattaccaaagttttccccactcgctcacataccgttgcagcccaaggtggtatcggtgcatctttgggtaatatgagtcctgataactggcattttcatttttatgataccgtcaaaggctctgactggttaggtgaccaagatgccattgaatatatgtgccgtgaagcacctaaggtcgtttatgagctagaacacatgggcatgccctttgaccgtaacgcagatggtacgatttaccagcgcccatttggtggtcacagctcaaattatggcgaaaaacctgtgcctcgtgcgtgtgctgccgccgaccgtacaggtcatgcgcttttgcataccttataccaaaaaaatcttgaaaaaggcacacagttttttgtggagtggattgcgctcgacttgattaaagatgatgaaggtaatattaatggcgtgatcgccctagaccaagaaacaggtaatatttcggttttccaagccaataccacagtattagcaacaggtggtgcaggtcgtatctttaaagcatcaaccaatgcttatattaatacaggagatggcttgggcatggcggtgcgtgctggcattcctttgcaggacatggaattttggcaatttcacccaacaggtgtggcaggagctggcgtcctattgaccgaaggctgtcgtggtgagggtgcaattttacgcaataagcatggcgaagcattcatggagcgttatgccccaactctaaaagatttggcccctcgtgatttcgtctctcgctctatggaccaagagattaaagagggtcgtggttgtggtcccaatggtgattacattgtcatggacatgacgcacttaggtgctgctacgctgatgaagcgcttgccgtcagtgtttgagattagcaaaaactttggtaatgtggatattaccaaagaacctgtgcctgttgtgccgactatccattatatgatgggtggtattccaaccaacattcacggtcaggttactgtaccaaacctagaaggtcctgttgatgaacagggtctatataccgaaggtcgcattgttaaaggtctttatgccattggtgagtgtgcgtgtgtatctgttcatggtgccaatcgcttaggtactaactcactgcttgatttggtggtgtttggtcgtgcagcaggtcagcacatcattgatgaatttaaccaaacggggcgtaattataagccgcttaatccacgggtgctagattttacccagtctcgtcttgataagctacaaaactctaccgaaggctacaatgcccaagaggttgctgatgagattcgtaataccatgcagtctcatgctggcgtgtttcgtactcaggcactgatggatgaaggtgtacaaaaaatcatggcacttgccccaaaagttgagcaaatccatttggcagataaatcagctgtctttaatactgcccgtattgaggcacttgaggtagcaaacttatatgaagttgcaaaagcaacgatgatttctgcgtcactgcgtcacgaatgtcgtggtgcacatatggtggttgattatgagcatccagcagattatgagccagcaccacttggccgtaatgatagcgaatggatgaagcacacactttggtattcagagggtaataaagttgtgtataagccagttcgtaagcagccattgacggttgattattgtgtgccgcgtgttcggactttc

SEQ ID NO: 42 - DNA, 774 bp, Moraxella catarrhalis
gtgttacacacaaatactggtcctacccaaaagcatgggtttataataatacgatcaatcaccaccaaggagcctgacatgatcatcaacaaacctctgcttgccatcgcttttgctactgccttgagtgcttgtagtcagcccaccgctggcactgagcaaacagctgcactaagcacacaaaatgcacaagagacgcagcacgcagcacacgcccatcacgataccagcatgccgatggctgcacacaccagcgagtacatgcagtcgatgaacaccatgcacgatgcgatgatggcagctgccaccaaagctcatgccgatgtcgctttcgttgaagggatgatcccgcatcaccaaggggcgatacagatggcacagatcgagctaaaatacggcaaagatgccgccatgcgtaagcttgcccaagacatcatcgatacacaacaaaccgagattgaatttatgcaaaattggctgaccaccgcccaagataaagatgccatcgatgccaatagcgagcacgccaaagcctatcttagcgacatgagtatacatgatgcgatgatgacaggggtacatcacgaagatgctgacatcgcctttgcccaagggatgattccgcatcaccaaggggcgatacagatggcacagatcgagctaaaatacggcaaagatgccgccatgcgtaagcttgcccaagacatcatcgacgcccaaaacccagagattgcactgatgaaacagtggctcggcagtcgtggtatcagccaa

SEQ ID NO: 43 - DNA, 2424 bp, Moraxella catarrhalis
gtgaaagttggtataataggtaaacatttcctgccaatcggcgtaattaaaagaatccttatgaccaacacaacgactgataccgacattcaaatcgaccatcaagccatttatgccaaacttgctgcaacgcatgccatcaaaagcactcaggttgaagcatttgctagactttatgatgaaggggcaagcgttccttttattgctcgctatcgcaaagagcatactggcggcctagatgatgagattttgcgtgaacttgaaaaatcactcatcattgagcgagatttggcagcacgccgccaaaaaatcctaggtttgttggctgctcaaaatgtcatgacggatgagcttgctgaacgggtgaataccgcctcaaccaagcttgagcttgaagagatttatcagccttatcgtccacgccgtcgctctgtggctgcacgcgcaaaattggcaggacttgaaccaattgcacatgctgttttggcaggtcaaagcccagcagaagcacttgagggctatgtatcacctgagacgctgaccgatgataaaggcgaaactttcgaggctgattttggtgattttgataaacaaatcgtcggcattcaggcgattattttggatgaatgggcgacagcattggacttattggacaaggtacgcactggatttaatgccacggcaagcattcgctctgaattaatcggtgaagaaaagcgtgaagtgggcgaaaaattcaaagactattttgagcataccgaaccatttgccaagctatcaaatcaccgcctgcttgccatgttgcgtgggcgtcaacaaaatgtgttggtactacatgttgatggtgaagatgaaccatttattgagatgatcatgcgtcattttgagatcgactcaaaagctgctaatggtgaatttttgaccgagaccgccaaaaaactttggctggttaagtggcgttcacagattgagcaccgcctcttaaccgagcgtcgcttggcagcagaggcggatgccatcgctgtttttgcagagaatctcaagcatctacttatggttgctccaacgggtcgtaaggcgattttgggggtggatccgggctatagtcatggcgtcaagatggcggtgattgatggcatgggtgaggtgttggcaactgatacggtctatccttttaagccgcaccataaactggccgaagccaaagatcgcattgagacgctgattaagacgcatcaggttgaattggtcgctattggtaatggtactgccagccgagaaagtgaagagctggtgaaatcaatcattcgtgaagcctcgttatctactcaggcattggtggtctcagaggcgggtgcatcggtttattcagccagcgaaatcgcctcccaagagttgcctgatttggatgtgtcggtgcgtggtgctgtgtcgattgcacgccgcttacaagatccgttatcagaattggtcaaggttgagccaaaagcgatcggcgtcggtcagtatcagcacgatgtcaatcaaactgagcttgaaagcagtttagacaaggtaaccgaagactgtgtcaatgcggtgggggtagatgtcaataccgcaagccctgcaattttagctcatatctcagggcttaataaaaatgttgcccaacaaattgttgagtatcgtcgtgcacatggtgcttttactaaccgtgaagcactaaaaaatgtaccacgcttgggcgtcaaaacttttgagcaagcggcagggtttttgcgtatcaaagagggtgatgaaccactggacgctactggtgtccaccctgaaagctacggattggtatatgaaattttaactcagcatggtaaatcactagatgaggtgttgggcaatgagagcttgaccaaagcgcttaatgacagttcggataattttagccaattggcaacggttttaaatgagcttgccaaacctgcacatgaccctcgtggagagtttcgtactgccaagtttcgtgatgatgttaatgaaatcaaagacttaaaagtaggcatgacccttgagggcgtcgtgaccaatgtgaccgcctttggctgttttgttgatgttggcgtgcatcaagatggcttggtgcatatctcagagctgtcagatggttttgtggccaaccctgctgatgttgttaagcctcaagatattgttacagttcgggttatttcggtggatgaagtgcgtgggcgtattggctttagtatgaaatctgaaaaatctgccaaagctaatcagtcagccaaggcggataaagcagacaaatcggcaaatcataagcccaaagcagatcgcaaacctgctcgccaagacaaaccaaaatctaccgccaaacctgccaaaacgatgggcagctttggtgtgctgttacagcaggcaggattgggtaaa

SEQ ID NO: 44 - DNA, 1032 bp, Moraxella catarrhalis
atgagattaatcaattttaagttggtctgtactatgatgaagatgatttttcgtggcacattggcaatcatgctatttgtgtcatcttttagcacgcttgctttagccaatagcccagagacacacaccacgcaaattcagacacggcttgccagtgcagggcttgccacacctgtcgttaaggtgacccaaagtgctgtgcctaaactgtggcaaattactttggcagatggcaatcatttactgatcagtgaagatttagattacatcattcaaggtaaacccagtgccaacccaagccctgccacgcccatcgatgccgccactcagaccgctcttcccatcggtacgcccatcacaccagaacaccgtaccgccttattaaaaaatatgagtgccatgcatgatatgacagaggctgttttttatcatactggtatccaaggcgtgctgtggggcatttcaggacaaggcgacaccacctttttaatcagcagtgatgggcgttatctgatggatggtgcgatggccagcatcaaaaatgcacaattttcagaatatggcttggtatttgaagcggccaaaaatcgccatattttaggggaattatctgataaagatttggtcatttatccttcaaaaactcgtgaaaaatcagtactttatattgcaagtgatatcaattgcccttattgtaaaatcctacacgaacgcatcgatgagctgaatcttcacggtgttaccatcaaaattatcggctatcccatttatgatgaatcacgactgcctatgaatcatatttggtgtacgacagacaacgccaagcgtgctgccctgctatctgctgcaatgaaaggcattatcccaaatagccaagcccaatgccaacacaacccaaatccactatctgccatccaaaaacaggtaatgccacttgccatcatgggtacgccagcggtttttgatgcccaaggcagagaatttacaggtgatttatccaaccatgaaatttaccaatttttaaaccttcgc

SEQ ID NO: 45 - DNA, 795 bp, Moraxella catarrhalis
atgaataagcttaaaattggcattatgggcgcatcaggacgcatgggtcgtatgctcatcgaatcgacaatgaaccacccaaacaccgagcttggcggggcttatgtacgcagcacatcaagcttgatcggcgtggatgctggcgaattcatcggcggtaaaaaatcaggtgttgcactctcaacacttgacggctctcaagttgatgtgatgattgattttagcttacctgaagccttcgatgaagcactcaaccagtgcgttacgcacaaaattccgctcgtgatgggcgtgacaggtcttagtgatgaccaagaagccaagcttcaagatgccgccaaacacattgccattgtctatgcaggcaactattcaactggtgttaatttatctctaaacctgcttgcgacgactgcccgtgtgctgggtttggatgctgatgttgaaatcattgagcatcatcataaacataaaatcgacgcaccctcaggcaccgcattaatgatggcacaagccattaccgaagcacgaggacaaaatataaccaatgctgccatctatggtcgaaaaggtgctgccaaacgccaacgaggagatattggtattcatgcgttgcgtggtggtgagattgtgggtgagcataccgttgaatttatgatggatggtgagattatccaaattactcacaaagctcaaaatcgtgcaacttttgccacaggtgcactaagagctgcattatgggcagcccagcagcctgcaggtttgtatgatatgcaagatgtattagagctgaaa

SEQ ID NO: 46 - DNA, 1674 bp, Moraxella catarrhalis
gtgccatctttttggtggcacgactgtaagctttgtacaaataattttgccaacaaagacgcttggacttataatatactcatcgtgcttttaatttggcacctcatcatcaatcaagtatctgccatgacatctacctttacactccctttttggtttaaacccagtcttgttgcagggatgcagcgtggtatcgaaaaagaaggcttaagaatgcagcctgacggctattctgccaagacctttcatcctgccaaacttggctctaagctgacacatccttatatcacgaccgattattctgaaaacctgcttgagctgattaccaagcccatgccatcaattaaacaagcacttgatatgctgcgtgatttgcatgttttagtgcatcgcagtttagaaaatgatgaactgatgtggccgttatccatgccttgtatgacctctgataccgacagtgatattccattggcggactatggctcgtcaaatatcggtaaactcaaaacgctgtaccgctcagggcttggggtacgctatggccgtaaaatgcaaacgattgcaggcttgcattataatttatccgtcggcgatgatttatttggtgtatggcaacatgccgagggtgcaaaggatttaaccgcctttaaaaatgataaatacttggcattgattcgcaattttaagcgcctgacacctttggtactgtatttgcttggtgcaagccctgcggtatgcggtacttttgtgagcggtcgccagcataatttgataccacttggtacaacttgtagctaccatcagccaaacggtacaagcctgcgtatgggtaagcttggttataccaatagcgcccaagaggatttggatattcgctataatcatttggacgaatatattaaaggcctgcaagcagccattggaacgccttatgctgattttgaagccatcggcgtggacgacgctcatggcgtacccattcagattaacaaccacattctacaaattgaaaacgaatattacagccccatccgcccgaaacaaactgccacagcttctgagacacccacgcaagcactgcaagcacgaggaatcgcttatgtagaatttcgtgccattgaccttgacccttattctgatattgggattacaagcgtaacggcgtgttttttggagattctggcattgtattgcttatttaccgactcgccttatctcatgccagaagaagaaaaacgcctaaatcaaaatattgatattgtcgtcaatcatggcagacaagcaggcatcgccattgatactgattttggtaaagaaaatctacatgattggattatccatcacttaacccaaatgcagaccatcgccgatgcgtttgatgcacatcatggcagtaaccagtaccgcactgccttgacaatgatgcaaggcaaagcaatcaatccagattttaccttatcagcacaaatcattgccgattcacaccgtgtgggtggcacctgggcgttaggtaaattactggctcaaaagcaccaaaccgaactgttatcccatacactaagtcgtgttgatgaggctgagtttgatgagcttgcacgcacctccttgattgaacaagcccagctggaagctactgatacgataggattttatgactatctaaaagcctaccgc

SEQ ID NO: 47 - DNA, 1380 bp, Moraxella catarrhalis
atgcacattcatattttaggtatttgtggtacttttatgggttcgttggctctgctggctcgtgatttgggtcatacagtgactggctcagatgccaatatttacccgccaatgagtacgcagcttgctgatgctggcgtggaggtttgggagggttatcacgcagaacacttgatacctacgcctgatttaatcgtcgtgggtaatgcatgtaagcgaggtatgccagccattgaatatatgttaaatgaacggttgccctacacttcaggtccacagtttttatacgaaacagtgctcaaggatcgccatgtcttagcggttgcaggtacacatggtaaaaccacaacaaccaccatgttggcatggattttacaattctcaggcattgatacaggatttttaattggtggcgtgccgcttgtcaatacagatgatagacgcctaagcttggcgtttcagcacagctcatatttaggcaagcaattttttgtcattgaagccgatgaatatgattcagcattttttgacaaacgctcaaaatttgtacattatcggccaacgacagccattttaaataatctagaatacgatcatgctgatatttttgcagatcttgatgccatccagacccaatttcatcatatgattcgtatgataccatctaaaggtcaaatcatcatacctgcaaacactccaagcctagagacaacattagataaaggcgtttggacgaccgtggtgcgtacaagcctaaatggcgatgccgagtggcaagccaaactagatgccaacgacggttcatcattttgggtacatcacaacaacacatcagccatggttcgctggtcaatgagcggtctacacaatgtcaataatgcattgaccgccatcgctgcggcacatcatgtcggtgtgtcagttaaaatggcgtgtactgccctgtcgcattttggtggtattaagcggcgtatggagttgattggtgatgtcgatgatattttggtatttgatgattttgcacatcacccaaccgccatcagcaccacacttgatggtgctaaaaaacgcctaactcctcggcgtatttgggcaattattgaaccacgctcaaatacaatgaaacttggcagtcatcgaccacatttggcagcatcggcagccatcgcagatcaggttatttggtatgagccacaaggactgacttggggtctcaaagaagccattggttctacgcccaatcagcgtgtactagacagtatcaacgccatcattgagcatataaaaacatatgccaaagcaggcgatgcgatcatcatcatgtctaatggtgactttgaaaatattcacggacgactgctggatgcactaagccaacct

SEQ ID NO: 48 - DNA, 1218 bp, Moraxella catarrhalis
gtgatgaaattttatatcgccaaaacacacattttcttagccctcatggtgggtttgtcatctatggcatgggcaaatcctgcggcaactttgacaggatttgccaaactggatgtcgaaacttatgccgcaggtccaatctcaggtagggcagccaagacagccaatggcatcgttgtaccctttaaagctcagccggttcaggggttttctggtgccctaaaaaaccatgatagcagctatactgtgttggcagataatggttatggcaccaaggataattcagcagattttttattgcggatttatcatcttgatgttgattttcgctccaaagaagggggtggtggtgaggtgaaagtgctggattttattcagcttcgtgatcctaacaagctcatcccttttgaaatcgttaatgaaaactcagctgacagactcttaacaggtgcagactttgaccctgaatctattcagcgaacctctgacggcagttattggattggtgaagagtttggaccctttttgctgcattttaataaagaaggcgtgttgattgatgcaccgatcgcattaccgcatccgaatcagaaaaatcagcagctgcgttcacctcaaaaccctttgaataccaattactcatcacctactaccgtgcagcgcagtggcggctttgaagggatggcgctgtcgagtgatggcaaatttttatatcccatgctagaaaagccattaactgatgcaagcactaagcagttgctaatttctgaatttgatgtccagaaaaaagcttatacaggcaaccattactggtttgtgctggatgaaagagcgacagcgattggtgattttcagatgattgataaccgatcagggattgtaattgagcgagatgataccgaaaacgactggaatggctataaaaaattgatccgcattacgcttggtcggtcaggtcaagcagttgatcgcacggatcttgttgatctgatgaacattgataatcccgatcatttgtacggtcctgttcgagcaggcgatatgggtgtgggtcaaagattcacttttccattttttaccatcgaagatattatcattgaagatgatcgcactatcacagtgtttaatgataataattttccaggctcgtcagggcgtaatgcaaatttggcggatgacaatgaaatcattcgtctaaatttacatcagcccctgcgc

SEQ ID NO: 49 - DNA, 1413 bp, Moraxella catarrhalis
atgcaatatatcagtacccgtggcaagactcagccgatgcagtttagtgatgtgcttttgatggggcttgcacctgatggcggtctgatgctgcctgaaacttatccaagtattgatgaagcaactttacaaaaatggcgtaatcttagttatagcgagcttgcatttgagattatgtcgctgtttgtgacagatattcctgcagatgatttaaaaaatatcatcaataaaacttatacaaaagcagcttttggcagtgaggatattacgcctgtgactcgtctttatgatcggttggcactgcttgagctatcaaatggtccaacgcttgcttttaaagacattgccatgcagtttttgggtaatgcgtttgaatatgtactaaaacaaaaaaacgagcgtttaactgtcattggtgcgacatctggcgatacgggcagtgcggctgaatatgcactgcgtggtaaagataatatcgaggttttcatgatgtcacctgaaggtaagatgagtgcttttcagcgggcacagatgtatagcttggatgatgccaatattcataatatcgccgtggagggaatgtttgatgattgtcaagatatcgttaaagccctccaagaagatgcaaaatttaaggcaaaatatagcttaggtacggttaattcaatcaattggggccgtattttggcacaaattgtatactattttaaaggttattttggtgcaaccaccgacaatgcccaaaagatcagtttttgtgtgccttctgggaattttggcaatatttgtgctggccacatcgcacgccagatgggcttaccgattgatcgattgatcgttgcaacgaatgaaaatgatgttttaaatgagttttttaatacaggcaaatacacgccacgcacttcggtcgaaacttatgtaacttccagcccatcaatggatatttcaaaggcttcaaactttgagcgttttgtgtttttattgcttgataaggacagtgtgcaagtcgctaagctgtttggagatgttaaaagtggtaagggttttgatttgtcggataatttaaaactggtgagtgaaaaatttggatttatagctggtaaatctacgcatcaagaccgcttggcaaccatcaaaaaagtttatgatgatacgcagcgattgatcgatccacacactgctgatggtgtaaaagttgcgattgagctacaaaaagcagatgagatgattttggttgccgaaacagcattaccagccaaattccaagaaaccatcgtagaggcagtaggtgagatgactttaccacgacctgagcatacccaaggcttagaagataagcctcaatatgttactgtggtgcctaatgatactaaggcggtagcagcattgattgagcaatatattactgcgtgc

SEQ ID NO: 50 - DNA, 1065 bp, Moraxella catarrhalis
atgagcattcatacaacggtcgccagacgcccttcatggcgtggcatttttgcaggacttttgatgggtcttgttgtatctatgataatgctggctttggccttagtgctaagctcttttttatcactagatttgcgtggcgcaggcattgctgctggtgtttataccgcagtaaccgctttaatcagtgcttttgttgcagggttttttgctgtcaaagcatcggcaccagaggcgttatttggtgatggtaccgacattttgccaaaagacgctgctttaacaggtatgctaaccgcagcagccatcgttgtcatcagctctgtatttgcttttaatagtgtaactggcattgtaagaactgctggcaacgctgttggcacaaccgcaggtgctattggaggggctgccagtgccgttacatcaacggtaacaacagtagctggtgctggtgctaccgcagcagctggctcatctgatgccgcaggtggcgatatcactgccaaagcacaagagctgtaccaaaaagccacaggcaatatcagccgtcaagacatcgaagcttgggttgctaagaataacgaaacttttgatgaagcacaaatcagtgcaacagtgaatgtacttgaagacatgcttcacaaaaccaaagctgaccttaatggcatggattttaccaatcttgacacatggaaaaatattgatgaatatgccaagcagcgtgccgacgaggtacaagccattgttacaggcgatgaacttattgccagactacaagcagagggtttaacccaagagcaggcgttggaagtgcgtgaagaaactgccaccgcttatcatgaatatcgtgccagcaccgaacaagccattgctgatgctaagatgaatattgagcaaactctacaaagtgcagaagatactgctcgtaaagctgctctatactctggtctgttttggttgattagcacgctactgacttttgtggcaagcatcatgggtgcaaaaacagccgcagcaaattaccgtttggcatcacccatcactgttcgtgagcgtgaccttcgt

SEQ ID NO: 51 - DNA, 1704 bp, Moraxella catarrhalis
atgctcatttctttgacttttgaaaacttagcactcattgagcaaaaacacattgattttgatgatagattcaatgtcattacaggcgaaacaggtgcaggcaagtcactgattttagatgcattatcgctgtgtgtcggtgagcgtgctgatagtagtatggtgcgtcatggctgtgatgaggcaagtgtttttggtgaatttgatatcagtggcaatgcccaagtgattgcttggtttgagcaacatgacagaaaattagaagatgaaacgctgctcattcgccgaaaaattagcaatcagggacgctcaaagtcttggattaacggcgtaccagccagtattagtgagctaaaaagcttgggatctatgcttgtgaatatccactcgcagcatgctgggcttgaactgctaaagcctcaatttatcgtggattggctggatcgcattggtgggtttggtgatttaaaggcagcggctaagaccgcttttcatcactatcaaaccctaaaaaggcaggctgatgacgcacgcagccagtcagcacagcgagcggatcggatggcactgttgtcagccaagcttaccgatattgaaccattgcttttggtggattttcaggaaattgaggcagaatacgatgagctatccaatcttgaaagtctcatgcgtgaagccctagaagcagcggtacaacttgataatgatgacgatgccccatcggtgctaagcctacttgggcgagcgatgcgtatttgtgataacaacgctcaatccagtaaaacatttggcgaatgtagtcaactgcttgtacttgcccaagagcaaatcatagatgccgttgctaagcttaccgattacgcagagcgggagctgcctgatgcggcgcgccttgatgagctaaatggcttattgagccttgcacatcgcttatcaagcaaataccacacgccgattactgagctgattgctgatgcagtgcattggcaagatgaattggatatgctaagcagtttgcctgataacgatacgatggatgctaaggttttagaggcttatcaagcctatctggtggcagcagatgcattggatcaggcacgcattcaaatcgcacctgatgtctgtgagcggcttgaggcacggcttgtgcctttggcactgccaaatgctcgctgtcagttttcttttaacgaaaaacctgttgagcattacaccgcccaaggcaaatacgatattgccttactatttagtgccaatgtgggcatgccacttcagccgttgcacaaagttgcatcaggcggcgagttgtcgcgtatggcactgaccatgcaagtgatggcggcggatgacggcataggtgcacatccaacacttgtatttgatgaggtggatgtgggcattagtggcgggacagcccaagtggttggcgagcttttgcgtacgctgggtaagcagcagcaactgcttgccatcacgcatcaagctcaggtcgctgctgcggcacatcatcatattttggtgtataaagaacacggtgaacacaccaaaagtcagatacaagttatcaccgatgaagcacaaattgatgaattggcacgaatgtcaggtggcgtgaatattaccgaagcgacacgtgctcatgttaaaagcctgctggcagacattcgccatgctgataagatggctcaaagaggtatggctaca

SEQ ID NO: 52 - DNA, 1230 bp, Moraxella catarrhalis
atgccaaatcataccacaacacagatgcctaaaagcagcccatctgccaaaacctcgttattgctactgattatcgggctgatttttgcggcggcaaatatgcgttcgcctttggtaatgatgggttcaatcgtgcctatgctgtccgatgattttggcctatcatcagtacagattggctatcttggtgcgatgccgatgccgttatttgcatttggctcattaatggcagcggtactggcaaaaaaatttggacttgagcggatgatgattggcatgacgcttttattggcgttgggggtggcaatacgaaactggtttggggtgatagaattgtatgttggcacgctgattttatcgtttgccattgggatgctaaatgccctaactgcaccttttattaagcaatacgcccctaataacattgcacttgctacaggtgtgtttagtctaagtatgtccactttggcgggctttggtgcttggatggtggtgccatttgccaaaacatttggctggcaatttgcgatgagcagttgggcaatctttggtgtgattgccgcatggatttggtggttgatttatcggcataatcgtatggataatcttaaacttatgccagccttacccacgatcaagccaaccgctcatctaaaaaaacccatcaatctttggcgtcaaaaagccgcttggcaaatggcggttttacttgggcttcagtcgtttttattttatagtttggcaagttttttaccatccattggtatggcatttggggtaacactagatgaggcgatacgattacccttcgtgtttcaggttatggcaccacttgccattttatggctcacttggctttcacggtgtggcacatcgtttcagattatttctgtggcaggttgtttgatgaatgctttgggcatatctgggctgttaatgatgccatctttgatgctgttttggtcagctttgatgggctttgggtgtgctttggtgtttaccttaagcttgatgatgttctcgcttcgtacgaccagcaccgaaaccgcgcgtgatttatccagtatggtgcaagcggtgggctatagcattgcgatgtttggtccgttgatgattggtaagctgtatcaatggcagggtgattggcaattgccgttgatggtattggtggttttgatgataattaatatcccatttgggctatgggcagccaatgagaccaaaattggc

SEQ ID NO: 53 - DNA, 336 bp, Moraxella catarrhalis
atgaaacttaatactttatcagccatcgccttattatttggcggtcttttgtatgcaggctttggatatgccaatccgcccaaacagtgctatgctgatacaaaaagtgcctatcaagcactgataagtacccaaaaatccaaacgcctaaatatcaataccgcaagccaagctgactttataagcttggtgggcgtggggcataagaccgcccaagccatcgtggattatcggcacgagcatggcaaatttgattcagttcaatcactgatgaatgtcaaaggtattggacctgccattttaaataagaaccgtcaccgcttaagcgtggcaaat

SEQ ID NO: 54 - DNA, 1782 bp, Moraxella catarrhalis
atgggcaaagtgcctaaaaagccaaaacaaaccaaaaagagtatttgtaccacacattcagccaaatcgctgcgactacaaaaaggcagtttgccgcacagtattgtcgaggtcatcggcacactacaaaaagcaggatttgatgcttatattgttggcggtggcgttagagacagcttacttggtttggcacctaaggattttgatgcggtgaccgatgcaagaccgcatgagattaaggcaatttttgggggtcgttgccgtatcattgggcggcgttttcagttggcacatgtgtattcaggtcgtgagatgattgaagttgcaacatttcgtgctccacccaaagacgatacacacaccaccgatgacggtatgattatccgtgataatgtttggggcgatattgagcaagattttgctcgtcgtgatttttctatcaatgcgttgtattatcagccaattaagggtgaagtgctggatttttgtggtgcattaaaagacatcgacagtcatacgcttcgcttacttggtgatgccaaggtgcgtattgaagaagaccctgttcgtctgctgcgtgcgttgcgatttaaggcgaaactgggttttgaatttgatcaagatttggcaaatcaatttcatcaagacaattggacgcttttggagcaagtctctgcccatcgtctttatgatgaaactcaaaaaatgttcggtggtggctatttgacgccgctgttgccactgttgtttgaacatggggcgatgtcaagtttgatgagctttgcacccaatgagccgacgcctttgatgatggtggtcgcccgaaataccgatcggcgtatcgcagcagacaaaagtgtcaatccagtatttttttatgcagcgatgctgtgggaaaattatctgtatcaattggcgaaatataaaaagcgtggcttaccgtttcatgaagcacagattaaggctgccgaaaaaaccattgacgcccagcgtatcaaaactgccatacctaagtttgccgaacaattcattacagatatttggttgcttcagcctaagcttgtcaatccaagggtgcgtgatatcgctaatttggagcgtctgccaaaatttcgtgccgcatttgattttttggtactcagagaaggttatgatacccatccattatctgagccgacccaaaatatgggtgcttggtggcaggcgtatcaggacgccagtgctgttgataaagcgatcatgattgaggcgtttggtacgcaagcaggcacgccaaagcgtcgccgtgatcgtaatgccaaaaaagataccaagactcgtgagcttgagcagcttaaagagttgtctttgcgtagtgacgatgagctaatcaaaacacgccctgaaccattatttgtggtggcgggtgcagaagatttggtcaaaaaaaccaaagcacgaaccaaattgcctacgcctgtctttgagccagtgaattttacacaagctgattttgaaaaattgcttgccaatgatgagccgtatattccagcatctcgccatcgtaagcgtaaaccatcatccactttatccatcaaagagcgtgaacaagggttgatcaagcagtcagacgagcattggtctggctctaaacaatcggctcaaacaaaaaaaccatcacgccatcaatctaaacaagttgatggtgtcactgatattgagcctaagcttgtagaaaatcaagccaagccaaaaagaacacgccgccgtaaatctaatgccaaaccaaaggcagacagcata

SEQ ID NO: 55 - DNA, 1320 bp, Moraxella catarrhalis
atgggtgttactgtgagtttgtttcaaaactttatgattattcttgtactgattttgacatcgagttttttctcgatttcagaaattgctttggcaggttcaagaaaaatcaaacttaaattactggcagaatcaggcgatgaccgtgccgagaaagtcttaaaattgcaagaaaattcagctgatttttttgccacttcacaaattggcctaaatgctgtcgccattttgggcggttcggttggtgaaagtgccttgcgtccttatttttccgaatggattggcttggtatatcaagggatttggcttgacagcatcgcttttttttcgtcgtttgttttggtaacactgctatttattttatatgctgacctgattcccaaacgcattgcaatgattaatcctgagcgagtggctttggtggtcatcaatccgattttatggacaattcgtgtggtcaagcccttggcatggatcatcaataccatcgcagatgtgacttttcggctttttaaatttgatacggctcgtgatgacagtatcacctttgatgatatttctgccattgttgatgctggggcagaggctggcgttttgatggaacaagaacagcactttatcgaaaatgtttttgaacttgaagaacgcaccgtgccatcatcgatgacggctcgtgaggatgtggtatattttgcactcagtgaaagcgaggagagtattcgtcaaaagattgccgattatccttattctaaatttttggtctgtaatgagcatatcgaccaagtcatcggttatgtcgataccaaggatattttggtacgaattttaagcgaacagccaatttttcagctgaatgaatctaccattcgtaatgtactgattattccagatacactcactttatccgagcttttggataaatttcgtgccagtaatgaaaaaatggcggtagtcattaatgaatatgcattggttgttgggctaattacactatcagatattatgatgactgtcatgggcgattgggcagccgctgagcctgaagatttacaaatcattcgccgtgatgaaaattcatggctgattgatgggattacgccgattgatgatgttaaacatgcccttgatattaatgagtttcctgattgggatcactatgagacgctggcgggctttattatgtatcgcctgcgtaagattccacgccctgcagactgggtagagcatgagggctttaaatttgaggtggtagatatcgaccattataagattgaccaacttttggtaactcgcctagagcaactgcccaagcacgaagac

SEQ ID NO: 56 - DNA, 435 bp, Moraxella catarrhalis
atggcatcaaggtcaatcaccgcaccgacatttgaagcggtcagaatatgccccaaatcctgccccaaaccgtccgagatgtctatcatgctatttgcaaagccgatgagctgcctgccaagtgccacttgtggggcggggtattgcatggcttggcgtaatttttcaggcaagctctctggtggtcggttggcgtgtccgtctccatgtaaatcgtccaaaatcccatgcaaagcaaggcttgccagccccaccgtaccactgacacacaccacatcgcccacgcatgccccttggcgtgtgattgcctgcccatgtggcacaaatccaagtgccgttactgaaatcgttaaaatgggtgagcttgtggtgtctcccccaatcagctctaccccaaacggtgtgcaagccgtcgccaaaccccctgcaaatgcc

SEQ ID NO: 57 - DNA, 999 bp, Moraxella catarrhalis
gtgagcaccatgtcaaacaccatttccacctctgatgaatttagtcatacgacggttttgttgccagaaacagttgcgatggtgcttggtgtcaaacaattaaacgatgtcacttcaaaagtttcaggtgtgtatgtggatgccacttttgggcgtggtggacatagccagcttttgcttgaatatttggcacctgaggcaactttggcggtctttgataaagacccagaagccatcgctgtcgccaaaagtctggcagcacaagatacacgcattaaggttgtgcatgacagctttgctcacttaacaaaaaatttacaggcattgggtattgataaaattgatggtttgatggcggatttgggtgtctcaagcccccagttagacgatggaactcgtggctttagtttcatgcgtgatggcgtagttgatatgcgtatggataccacacgaggtgagcctgtctctgagtggttacagcgtgtatcggcggatgagctggctgatgtgttgtatgaatatggcgaagaacgccattctcgcaagattgcccgagcgattaagtccatgcaaaattacacttccacacgacaattagccgaagtcatcaagcaagcccatcctgcatggcaaaaaggcaaacatcctgccactcaaagctttcaagcaatgcgtatttttattaataatgagcttggagatgtggaggcatttttggcacaaagtatcggggtgctaaaagcaggtggtatgcttgcggtgattagttttcattcgcttgaagatcgtttgattaagcagtttttgcagcgtcatagtcgtggacagtatgaagaagatgcacgcctgccgatcatccctaagcgtccaaaatattttggtaaaccaaagcgtattgggccttgtgatcaggaagttaaagccaatcccagagctcgcagtgcgtggctgcgtggtgctgtgcgtagtgatgtcgctttggtggcacaagacgaagat

SEQ ID NO: 58 - DNA, 360 bp, Moraxella catarrhalis
gtggcgattttcatgagcaacactcctttgatgacaacactcaactcaagcatgacttgggttttgcgtttggtgttggcggttttggttgtgatgatttttgcaaccgctttgggcatcgtcacccaaacccaagagcgacacgaagcctatattgaattacaaaaacgcagtcgtgaattaaatgagctaaaaattgaagagcaaaggttgatgattgagcagcaaacattcagtgccacgccgcaagttgctcagcgtgccgtcagtgagcttggaatgttttttccgaccaatgaaaaccgccgtgtcattacgccgagtgctaagcctgactctgagccaagccaaaatagcgag

SEQ ID NO: 59 - DNA, 1956 bp, Moraxella catarrhalis
atgaccaaacaaagaaaaaatccaaaaactggctcagcgacgacagcagcgtctttacaccgtccaaaggcgtctgccaagacttttgggattttaaccaaaaaacgcatcaaaaaatctggcgctaatttggctggtggcaagcaagatgcttggcgatatttgatcattggggggttgatgctgtgtatatttatggcgatttttgcacgcgcattttatctacagatcgtcaatccgcagttttttattgataaaggtgatgagctgattacgggcaaacgcattgaacctgcgtatcgaggtgtcatcacagatcgtgaaggtgcacctttggctgccaatgcaccattatatacggtattttttgatccttatgcctatgccgaagaatattatcgcttagacaatgaaataaaaaccaccaaaagtgaaaccgccaaacaaaaagcactcaaaaaactcaaagaaatggacttggttaggttggcagcggcggcaaattatccgcttgaaaaacttgaagcggctgttgggattgatcatacacttgacacctctaatagccaaaaagtcaaagaagctttaccaaaaggtgcaagctcacgccgtttggtgctattaaaccgtgtatcacctgaagttgccaaatccgtcacagatttggggttatttgccattggtcgtgagcagtattttcaacgctactatttacaagctgaacccaatgcacagcttttgggttatatggctcagtcaagtgacgagactcaaggcggctatattgggcgtgcaggcattgaggctaaatataatgagcgtttggcgggcaaagatggcaaggtacagattttgcgtggtactggtcggcagcccattcaagagattgagcaaattgaaccgcttattgaaggcgaaaacattcgcttaacaattgactcacgattgcagtatgtgctttataaagagcttgagcaggttgggcgtttgcagtcggcgcgttcaagctcaggcatggtggttgatgttaagacgggcgaagtgttggcgatggggtcatggccatcttttaattctaataatttgtccgaacgagatggtgctaacgaaagaaaccgccccgtgcttgatgtgtttgagccaggttcggtgatgaaaccgttcacagtggccgccgcacttgaatctggcaaatacaccacaaattctgtgattgatacaagcccaggcagtatgtcggtaggtggatatacaatccgagatagtggtaattatggcgtcatcacgctagataaactgatccaaaaatccagtaatgttgcctcaacaaaaattgcgttaaatttaccgactgatgccatcgctaatatgcagcttaaatttggctttggccgcaagacggcactggatttccctgctgaggcatcgggacgagttagcattccaaaagagcgtgagctggcacgccgtgcaacactaagttatggctatggtcagcaagtgacattggcacagttggcccaagcttatgcagcacttggcaatcgggggctgatgcagccattaaaacttgttaaagatcaaaaaacgcccgaacctacccaagtcattcatgcaggtcatgccgaagccattgtgcgtatgatggagcttgtgacaggaccaggtggcacaggtcaagccgctgccatcaatggctaccgtgtggcgggtaaaacaggtaccagtcggcgtaccaatccacaaggtggttattataccgatcagcatcgtgcgatttttgtgggcttggcacctgcgtcagatccacgctttgtggtgtcaattttggttgaagatccacgccgccaatcgtatgcaggccaagtatcagcacccgtattccaccaagtgatgaaagaggcactgcgcttatataatgtgccttatgataagcctttacgggttttagcaccc

SEQ ID NO: 60 - DNA, 2736 bp, Moraxella catarrhalis
atggcaaaaacagttaaacaacttgcacaaacttcaaaaacaacaaccgaaaccatcctaaaacaacttgccgatgctggtctaccaagtcgtggcgaaaatgatcttgttaccgatagcgagcaagataaactggtggcttttttaaagcaaagccatggtgaaaaacccaaatctcgcatcagtttaaaatccaaaactacctcaaccgctcaagtgacaggcacatcaggtaaggcaaaaacggtcaatgtcgtgcgtaccaaaaaagtcgtctatgacaaaccagatccagctaagattgaagcgaaaatcgcagcccaagctaaggctgccgaagaagcacgcctaaaagctgccgaagaaaaacaagctgccgaacgcagcaaaaaagaagcagccgagcgtcaagcggcaaccttggctgcgatgcgtgcaagcagtgagcctgtaaaaaatcatgaggttaatgcgacggttgtcgtcaaaaagataaaaaatccagaagacgccaagcctgctgataaagcagaaaaaaccgataagaaaaaacctgccaaacccatcaaaaaagaatcggcaactgacaaaaaagcgcgtgaagctcgtgaagcagaagaagagcgtttgcgtcagatggaggtagaaacacgccgtaaagctgccgaagaagctcaaaaacgcacacttgagcagatgaaacaaatggcgtctcgctatagcgatgctgatgacggtgcgactgccgctattgttcgtaccaaagacgatgcaccgttggctgatggcttggtgggtgctgcgcttgaagaatcatttgaaaaagagcgtcgtgaaattaaacgaggtgcaacaggcactgctggcaaaggcggtaaaaaaagccgcaaaggtcagcaagaagagcgtgaaatgaaaacccgtgcaaagggcttaaaatcatctcaagccaataaacataaatttgaaatgcctgttgaaaaaatcgtccataatgttgaggttggtgaaaatatcgttttatccgatttggcacaaaaaatggcggttaaggtgcgtgaagtcatcaaatcactgatgaagatgggtgagatggtgcgtgagtcagacagtatcgatcaaatgaccgctgcacttgtcatcgaagaatttggccataactttgtaccgatcagcgatacccagctagaagatgatttacaagtcgctgttgatgaaaaatcaggtaatgtccaaacacgcccacctgtagtaaccatcatgggtcatgttgaccatggtaagacatcgcttttggataaaatccgcactactaaagttgcaagcggcgaagcaggcggtattactcagcatatcggtgcatatcatgtaacaacagatcgtggtctaattacctttttagataccccaggccatgctgcttttaccgccatgcgttctcgaggggctcaagcaacagatatcgtggtgcttgtggttgctgctgatgacggcatgatgccacaaaccgaagaggccatcgatcatgctcgtgctgcagggacaccgctcattgttgcgattaacaagatggataaagataccgccgatccagatcgtgtgattaatgagttgtccgtcaaagaagtcattccagaagagtggggtggcgatactcctatggttaaagtctctgccaaatcgggtatgggtattgatgagcttttggaggttattagtatccaagcagaactgatggagcttgaggcaccgattgatggtgctgcccaaggtgtggtgattgaatcacgcttggataaaggacgaggtgctgtggcaagcttattggttaagcgaggtacattaaatcaaggtgatttggttttggcaggcgaatactatggtaaggttcgtgccatgactgatgaaaatggtcaacgcatcaaaaccgcaggcccatcaattcctgttgagattttgggtctaccagaagcacccgcagcaggcagtgaatttttagtggtatctgatgagaaaaaagcccgtgaagttgctgattttcgggcagcacgggagcgtgaacgcacgcttgatcgtcaaaataaaatgcgacttgataccttatttgaaagtatgggatcggcagaagttgcaactttgaatatcatcttaaaaacagatgtccgtggttcactagaagcgttattaaatgcattagacgaactttcaactgatgaagttaaagtgcgtgtgatcagctcaggcgttggtgcgattaccgaatctgatgtcatcttggcagaatcaagtgaagcggtattgcttggctttaatgtccgtgctgataatgcaggtaaacgcaaggcagatgaagcgggcatagatattcgttattatagcgttatctacggtcttattgatgatgtcaaagcagcaatgagtggcatgcttgcaccagagcatcgtgagcagattttaggtatcgctgaggttcgtgatgtcttccgctcaagtaaatttggcgcagccgcaggctgtatggttcaagaaggtactatttatcgcaataagccaatccgagtcttgcgtgatgacaaagtcatctttacaggccatttacaatctttgcgtcgctacaaagacgatgtcaatgaggtaaaagcaggtatggaatgcggtcttgcggtcaagggctatgaggttgccgtgggtgataagattgaggtctttgagatccatgaagtgaaacgagagcta

SEQ ID NO: 61 - DNA, 471 bp, Moraxella catarrhalis
gtgaattttaataacattttattaatcgtatatctatttagaggacttatgaatcaacgattacagcgacttgctgaccaaattcagcgtactttagccattttaattcgagatgagattaatgacccacgcttgacggggtttgtgaccatttctagtgtgaaggttagccctgatttgggctatgctgatgtttatgtgacgattttggagccaagtcaagatggtggcatgaatagtgaggcacatgctcaaagcttaaaagtacttaataccgctgctggatttttgcgaactgagctggcacgcaccatgaaaacacgcaccacgccacgcttaagatttcattacgatgaggtgaccgcccatggtaatcgcatgatgagcttggttggtcaagccatgcaaaaaacccaagaaagtgaaaaaaactatctggatgaagagcatcagttggatgatgataaatca

SEQ ID NO: 62 - DNA, 705 bp, Moraxella catarrhalis
atggttgagcttatcatcagtataagccgatataacaattcatgtgagtatatgatgaaaaaattaattttagcaacagtcttggcaggtctttcaactgccgctgcagccaatgttttggttaataacggttattatgttcaagccgatcttggttattcaaatctagaagcaaaatataacgacaatcgacccaacgacaataaacttgaagataaaggtttgggctatggtatcagctttggtaaagataccgacttggctcgctatgccttagattatacaaattatggtaagattaattcttcttacacttatcaaccacaaacgaacacgaacacgagtatcacctcttcaggcgagcttaaggcacagtctttgggtctttcagccatttatgattttgatacagtgtcaggttttacgccgtatgcaggtgctcgtgtgggcattaaccaaataaaaagcactgtttcgacagtgacaacaacgacctctgcccaatcaagaactacccacagtcaaaaacaagaaaataaggttggctttggtgtgctggctggggcgcaatatgccatcaacccacagcttagcgttgatgctggcgttgagtataattatctgggtaagtatgataaattggatacagacagcaagcttaaggctcatcaatatggtgtgaaagtgggtcttcgccataacttt

SEQ ID NO: 63 - DNA, 333 bp, Moraxella catarrhalis
atgcaaatcaaactaatcgcatctgcactaatcgctactctagcactaactgcttgctcaaaaccacaagaacaagctgaagcagcagctgacgcaactgttgttgccaacgaagcatctgctgctatgactggtgatgcagctgaagctgcggctgaagcagcagctgacgcaactgctgctgccaacgaagcatctgctgctgctatgactggtgatgctatgactggtgatgctgctgccactgaagctgctcacgctgctgctgaccaagctcaagctaatgctgaagctgctcaagctgctgcaactgaagcaaccgaacaagccaaa

SEQ ID NO: 64 - DNA, 1707 bp, Moraxella catarrhalis
atgagcatacaaggtctactgcctcgttggattttacagctcattcagcacccacgcactgctttatcggacattccagctggactgatgatggcagtgctggttatcccccaaagtttaggctacgcaaccttagcaggattaccacccatcatgggtctgtatgctgccattacccctgtgattgtctatgcatggataggtgccagtagtgtctcctccatcggtcctgtggcaattactgccatcatgactgcatcggcactgtctggctacgctacaggcagcttacaatatatttcacttgccattgttcttgcctttatggtaggcgggattttattgattgctggactgattcgtttgggctggattatgcagtttgtcagtcgtggtgtcgcctcaggatttatcagtggggcagcggtattaattatttttagtcaactcaagcacatcattggcatacctctaaataccgacagcttaatcaacttatttttaagtatttataccagcactcagcccatccatttgccgacagcgttacttgggattggtgccaccttgttatttattatcagccgttatggtgaatcgataatttggggctggctacccactcagtggcgtgggtttggcaatcgcttttttgtcattttaattgttgccatctctatttggctcagccatcatatcggatttgagcaaatgcagatcagattgctacaacctttgcccacaggattgccaaagattaccttacccaatttttctgcaaccactttactagatttattaccctcggcactcttgatcgcactaatcgcttttatctcatcaagtacgatttccgcacagcaggcacggatacgaggtgagtcatacgatgccaacaaggaacttggtggcttgggcttagcgaatatcaccagcggcctctttggtggttttgcggtctcagggggcatttcacgcaccagcctaaacctatctgtgggtgccaaaacaccattggcatccatcatttgtgctttgggtgtattgctggttttgcttgttttcgggcaatatttgacaggcctgccctacgctatcttagcagcagtcatcatcagctctgtcatctcaatgattgataccaaaaccttgatcaatgcatggcagctggataaatccgatgccatctgttttggcattacttttttcacctcaattcttttcggtttaaatagcggtttggttgtcgggcttttggcaagttttgcaatgatgatttatcggacacaccaagtacacattgcgatcgtggggcgtgttggcgacagcgagcattttcgcaatattgagcgacatacggcaactacttttgatgggctgttacttttacgcatcgatgaaagcctgtattttggtaatgctcagtctgttcatgccaatttaatgcgattatctgatgataccaacattcatgatattgtgctgattatgactgcggtcaatcatatcgatttatccgcccaagagatgctatgtgcctttaatcaaagctgtatcaagcgaggtcagcacctacatttggccgaggtgaagggccctatgatggatattttaaagaccagtcctgtgattgaaaatctgtcagggtgcatttttttaagtgccaatcaagccgtacaaagtctaaccaagcctagcacagatctt

SEQ ID NO: 65 - DNA, 825 bp, Moraxella catarrhalis
atgcaaaattttatcaaaaaaaatattttggcagtgactttggcagcggctacgaccacaaccatagttggctgtgctagcacaaccagtacaggcgtggtaggtgctgaccgaaaacagctattgttaatttcaagccaagaaatcatgcagctatctcatcaagcctatttacaaaccatcaatgaagcacgcaccaaaggtcggcttgataacaataccgctcaagttcgacgccttcaccgtatcgccaatcgtctgattccacaaacggcggttttacgcccagatgcgacccgttgggattggaaagtacacgccatcaccgacaatcaaatcaatgcttatgtcatgccgagcggtaaaattgtcttttatactggcattattgagcgtcttagattaactgatgctgaaattgcagctgtcatgggacatgaaatggcacatgctttgcgtgaacattcacgagaaaaagccagtcgtcatattgctacccaaggtgtgcttagtattgccgtgaatgcccttggattgtcaggtgggcaagcacaattggttggcttggcaggtcggcttggattggatttaccgcactcacgcacccaagaagcagaagctgataaaattggcattgagctgatggctcgtgcaggctatgacccaaatgctgcgatcactttgtggcaaaaaatgcagtcagctggcggtaatggcgtgccacagtttttaagcacacacccaagctccaccaatcgcattgccaatttaaaagccttagtcccaacagtgatgccgctatatcagacatcacaaaacattcat

SEQ ID NO: 66 - DNA, 1140 bp, Moraxella catarrhalis
atgatgaaaacgaacatcaaattgattggcctatctgtcgctgctgttatcgcgctaactgcttgtagcaaaaaagacgaacaatctgctgcaactcagctagaaccagctgcaacgacagcagctccagctgacgctgccccagtcgctatggaacaagttgctatcaacatcacaggtgcaggtgcatctttcccacaaccaatctatgccaaatggtcagctgatttcaaagaagctaccagcggtcaagtgaactatcaatcaatcggttcatcaggtggtatcaagcaaatcatcgctaaaactgttgacttcggtgcttcagatgcgccattgactgtggatgagctaaatgctgaaaacctaatccagttcccaacagtgatcggcggtgttgtacctgtggtgaatatcgaaggtatcgaagctggtgcgcttaagctagatggcgaaactttggcaaatatctacttgggtaaagtgacgaagtggaacgaccctgcgattgttgcacttaacccagatttgacactgccagatgctgacatcaccacagtattccgttcagacggttcaggcacgacctttaacttcactgactacctaaataaagtttcaactgactgggcaggctcagtgggtgtggacaaagccatcaaatggccaaccgcttcttcaggcgctgctggtaaaggtaacgaaggtgtagcaagctatgttagccgcatcaaaaactcaatcggctatgtagagtacgcctacgccaagcaaaatggtatgtctcatgtagcacttaaaaacgccgctggcaaatttgttcagccatcagctgacagcttcgctgctgcaggtgacatcgattggtcagcagcacctggctttaaccaagtgctaaccaactcagaaactgcaggcgcttggccaatcgctgctgcaactttcatcatcgtacacaaaaacccagaaaatcctgagcaagttgctggtgttctaagattctttgactgggcatacaccaatggtgaccaagcagcgctagatcttgactatgtaccattcagcgacaaagcggttgagttgttcaaggcaagctggaacgaagtgaaagactcaagcggtaatgcagtttatgcacaa

SEQ ID NO: 67 - DNA, 837 bp, Moraxella catarrhalis
atgaatacacttaaccaaagtctaaatccaaccatgaacacagcgtttactaatagcaatactgatgacaaaactctaagccaaactgccgccaaagtacaagtgcgtaatcttgacttttattatggtgattataaggcgctcaaaaatatcaatttagatattttggataaaaaagttacggccttcatcggtccatcaggctgtggtaaatcaacgcttttgcgcacgctaaaccgtatgtatgacctgtactcaggtatgcgtgcaacaggtgagattatcttggataaccaaaatatcttagacagccgcgtcgatgttaacttgctacgcgcgcgcgttggcatggtgtttcaaaagccaaccccatttgctatgtcaatttatgataatgtggcgtttggtgtgaagttatatgaaaatttatctaaatctgagcttgacgatcgcgttgaatgggcacttcaaaaatctgccctatggaatgaagtaaaagacaagttgaaaaaatcaggtctatctttatcaggcggtcagcagcagcgtctatgtatcgctcgcagtgtggcgacgcgccctgaagtgttgctacttgatgagccgacatcagcactagaccccatatcaacaggtgcgatcgaagagctgatccatgatctaaaacaagactataccatcgcaatcgtaacgcataacatgcagcaagcggttcgctgctctgacttcaccgcttatatgtatttgggcgatatgattgagatgggcgaaactagccaaatcttcaacaatccgcaaaatcaagcaacggcagattatatcgctggtcgtcacggc

SEQ ID NO: 68 - DNA, 1488 bp, Moraxella catarrhalis
atgcccctatcagataccgaaaaattagccgctatcgatatcggctcaaatagtattcacttggccatcgctgaacgccatggcgatcagctcagacgcatcgcttcgatgagcgaaaaagtacaattggcgatgggacttgatgaatgcaatcacttatcatcggctgtcattgatcgtggtattgaatgcttgacacgatttgcagggcgtttgggtgatgtgaataattctcggttgcgtgtcgtggcgaccaatacactaaggcgtgctgtcaatagccaagaatttatcgtgcgtgctaatgatattttacctgtgcatattgagattatctcaggacgagaagaggcacggctgatttatttgggtgtatcgcacacttgcccaagtcatcagcaaaggtttgtggttgatattggtggcggctcaacagagctgattatcggcaaaaatctaaatcccatactcaccgaaagcacgcaaatgggcgttgcaggttttactcagcagttttttggagatggcaacatcaacgcactgtcttttgaaaaggcgatttatgtcgcccaaaaagaaatcattaagtatggtagccactataaaaaaactggttttgaggaagctgtaggatcatcgggtacgattaagaccatccaacaagcaatcgcagggtttgggttgggtgatgagattactttggcaggcgtagagcaattaaaatcgtctttgattgcttgtggtcatattgatgccatcgatatggcaggtgttaagtcgcaccgcaaaggcatctttcctgcgggtgtggcgatcttacttgcgatcatgcgtgtatttgggattcgcctgcttaggtactgtgatggcgcgctcagagaaggcgtgatgtatgacatgttatcacgcatggattttcatgatgtgcgtgatgactcggtggggatgctgattgatcgatttggtgtcgataaaaaacaagccaagcgtgtcgccaagacggcaggctcgctgtttaatcaggttcataaacccttaggcttagcgatagaaggtgaatacatgcttaggcgtgcagctttattacacgaagtagggcttgccattgggcatagtagctatcataagcattcaagctatttactcaggcatgcagatatggcggggttttctcgtactgatcaagaaaagttgtctttgttggttcgttatcatcgccgtaccattaatggggatgattgcgaccgaattatcaaaaatgggggcaagagcttggtttatttggcgcttttattacgcttatctgtcgttgcgaatcatgggcgttttgagatatccaaacatcagctaaaacttaccattgataatcatcactggcatgtgaccgtaaaaatcgaccgacctgaacatcaggcgtgcgtcattgatattcaagatgaagcgcattggtttgccaaatggggtatttgtttgacggtatcaagcgtt

SEQ ID NO: 69 - DNA, 309 bp, Moraxella catarrhalis
atgattttttctcgaataatctctgatgctaaaaaacgctctgagcggtcggtaatttgttcagcatcaaaaatggctggtctgatcggcaaatactcaccaatgacagactgtaatcgatcaagattatggcgacgaagtgcagaaacagggatgatatctgcaaaatcaaaactttcgctaaagctttcgatgacaggcaaaagttttgatttgtctttaacggtatctgctttattaatgactaagataacgggtaaattggtcgctgataacttctcaagcgttaataaatcatcttctcgccat

SEQ ID NO: 70 - DNA, 1359 bp, Moraxella catarrhalis
atgaaatttaataaaatcgctcttgcggtcatcgcagccgttgcagctccagttgcagctccagttgctgctcaagctggtgtgacagtcagcccactactacttggctatcattacactgacgaagcccacaatgatcaacgcaaaatcttacgcactggcaagaagctagagctagatgctactaatgcacctgcaccagctaatggcggtgtcgcactggacagtgagctatggactggtgctgcgattggtatcgaacttacgccatcaactcaattccaagttgaatatggtatctctaaccgtgatgcaaaatcttcagacaaatctgcacatcgctttgatgctgagcaagaaaccatcagcggtaactttttgattggtactgagcagttcagcggctacaatccaacaaataaattcaagccctatgtcttggttggtgcaggtcaatctaaaattaaagtaaatgcaattgatggttatacagcagaagtagccaatgggcaaaacattgcaaaagatcaagctgtaaaagcaggtcaagaagttgctgagtctaaagacaccatcggtaacttaggtcttggtgctcgctacttagtcaatgatgcccttgcacttcgtggtgaagcccgtgctatccataattttgataacaaatggtgggaaggcttagcgttggctggtttagaggtaactttgggtggtcgtttggcacctgcagtaccagtagcaccagtagcagaacctgttgctgaaccagttgttgctccagcacccgtgattcttcctaaaccagaacctgagcctgtcattgaggaagcaccagctgtaattgaagatattgttgttgattcagacggagatggtgtgcctgatcatctggatgcttgcccaggaactccagtaaacactgttgttgatccacgcggttgcccagtacaggttaatttggtagaagagcttcgccaagagttgcgtgtattctttgattatgataaatcaatcatcaaaccacaataccgtgaagaagttgctaaggttgctgcgcaaatgcgtgaattcccaaatgcaactgcaaccattgaaggtcacgcatcacgcgattcagcacgctcaagtgcacgctacaaccagcgtctatctgaagctcgtgctaatgctgttaaatcaatgctatctaacgaatttggtatcgctccaaaccgcctaaatgcagttggttatggctttgatcgtcctatcgctccaaatactactgctgaaggtaaagcgatgaaccgtcgtgtagaagcagtaatcactggtagcaaaacaacgactgttgatcaaaccaaagatatgattgttcaa

SEQ ID NO: 71 - DNA, 795 bp, Moraxella catarrhalis
gtgaaatttaaaacatttggacttatggcagccattgttggtacatttagtatctcagcttgtagcggtcaaaacgaacaaagcacaaaagccagtggtgacaccttgcgtattgcgaccgaaggcacttatgcaccatttaactacaccaatccagatggcagtttgggcggctttgatgtggatatcgccaatgcgttatgcaacaaaatgcaaaccgaatgccaaatcattgcccaagattgggacggtattataccagcattaaaaacaggtaagtttgatgccattgttgcagcaatgtcagtcacccctgagcgtagtgagcaggtggattttagcgagccttattttgtcaactctttggtatttttggcaaaaaaaggttcaaattttgatccgagcagcaccgatgccatcaataatgccaaaattgttgctcagcgttcaaccatctcaagtcaatggttaacccaaacttatccaaacagcaagccacagctgtacgatacgctggacaatgcttttattgatttaggtaatgagcgtgctgatgctatgatttctgacaaactgccagcattaacttggcttagctcggacttgggtcaaaattttgagatcaaaggtggggacattaatatcaatgataaagtctccattgctgtcgataaaggcaataccgcactattacaaaaattcaatgaggctttggctgcaatcaaggctgatggcacctataaacaaattgtcattaagcactttggtgaagcaggtatgccaactaatattgaa

SEQ ID NO: 72 - DNA, 786 bp, Moraxella catarrhalis
atgataaaaccatttgccactttggcaactgtcgcttgtgttactttggcgggttgtaccaaagaagaaaccagcacccaaacaacagcacccgctcagccaagccaaaaaagcattgtgatcgcaactgaagccgcctacccaccatttaatgacacggatgccagcggtcagattatcggttttgatgtggatgtgatgaatgccttatgtgccgaaatgcacgctcactgtcagataattgctcaggattgggatggcttaatcccaagcttattggcaggcaaatatgacgccatcatcgcaggcatgtccatcaccccagagcgtcaagcacaagtagatttttcggactcttatttttcaaatacgatcgtttggcttgccaaaagtgatggcagctttgatcccaataatatcaccaatcaaacccttgccagtcagcgtggtactactggtgctgcctatatcaccgaaaaatatgatggtaaagatggcaatcgtgttcagctgcatgacacctacaccaatgcttatttggacacaaaagcaggacgcaatcatgcagtcatggctgaaaaagtatcggctattgactggctaaagcaagagggtaatggtgagtttggcttaatcggcgaagagattgataataacgatcacttgggtatcgccgtacgcaaaggcgacagcctaaaagctgagtttgatgcagctttagcaaaaatcaaagaaagcggtaaattggcagaaattgaaaaagctcactttcaatcagatactttt

SEQ ID NO: 73 - DNA, 831 bp, Moraxella catarrhalis
atgaaactgtatagattttttctgacctttgtactaatttgcacctttttaggatttttcatgaccgattcacgccccattgctctggacttacaagacattcataaaagctatggctcacttgaggtgttaaaaggtgtgtctttgaccgcatacgatggtgatgtgatcagtattttaggctcatcaggctctggtaagtccaccttacttcgctgcatcaatctgcttgaaaagcctacctcgggaaaaatcattgtcggtcaagagacattaaaacttaaatcacataaaggcgaattggttgcagccgataataaacaacttgaaaaactacgctcaaaaattggctttgtgtttcaaaatttcaatttgtggccgcacaaaaccattttacaaaatatcatcgaaggccctacgcaagtgcttggtatctcaaaagctgacgccatcaaagatgccgaacggcttttgaccaaggttggtcttttggataaaaaagatgcctatcctgacaatctgtcaggcggtcagcgtcagcgtgtcgcaatcgctcgctcgcttgccatgcagccacaagtactgctgtttgatgaacccacctcggcactagaccctgagctggtcaatgaagtacttgctgtcatgcgtgagctggccgacgagggtcgtaccatgctcattgtcacgcacgagatgcgttttgctcgtgaagtctcaagcaaagtggtatttttacaccaaggtcgcattgaagagattggcacaccaaaagaagtatttgaccacccaaaatctgcacgcgtacgagaatttatggcatcgcaccgc

SEQ ID NO: 74 - DNA, 2625 bp, Moraxella catarrhalis
atggcaacttctaaaaaaacgaccaccaaagctgaggcagcattgaccaaagccaatgctcggggcaaatccttagtgattgtggagtcgcctgcaaaagccaaaaccattaataaatatttgggtaaagattatgtggtgcgttcaagcgtgggtcatgtgcgtgatctgcctgttggtggcagtgcgaccaaaaccaacaaaacccaagatgttggcttgtctcgtgaagaaaaagcccaaaaagcattagttcgccgtatgggtgttgaccctgaacatgactgggcggcggtgtatgagatattgccaaacaaaaccaaggtgattcgtgaactaaaagcacttgccaaggaggccgataaaatttatcttgccaccgatttagacagagagggtgaggcgattgcgtggcatttaaaagaagtgattggcggcagtgatgataaatacagccgtgtggtatttaatgaaattaccaaaacagccatccaaacagcctttgagcatcctgatcaattaaacattgatcgtgtcaatgcacagcaagctcgcagatttttggatcgtgtggtgggctttatggtatcaccactactttgggcaaagattgcccgaggtctgtcagcgggccgagtgcaaagtgtcgcaactcgtttggtggttgagcgtgagcgagaaattcgggcatttgtccctgttgaatattggaaaattcacaccaataacaccgcagcaggcgagacgctaaaccttgaagcggtcaaaaaaaatggtaaaacgctaaaacttggcaataaagcacaagccgatgaagttgttttggcgttaggctcatcagactttattgtgtcagcgatcgaagaaaagcccactcagtctcgtccatcagcaccctttatcacttcaacgctccagcaagccgccagtacacgacttgggtttagtgtcaaaaaaaccatgattttggcacagcgtttgtatgaagcagggcatattacttatatgcgtaccgactctacttttttgagccaagacgccctaaatttggtgcgtgaatacattacagatcattttggtgatgactatttgccccaaaaacccaatttttatggtaataaacaaaatgctcaagaggcgcatgaagcgattcggccttctcatgttttggtaaaatcctcgcagctgactggcatggagcgtgatgctcagcgtctttatgagttgatttggcgacagtttgtggcatgccaaatgatgccagcacgctatcagtcagtcaatttgatggttgccgctggcgatatagagcttaaagccaaaggacggactttggtttttgatggctatacaaaggtgcagccgcctgctaagactgatgatatcttactgcccgctgttaaagtgggtgaaaagttgcctttgattgagattttgccaacacagcatttcaccagcccgcctgctcgctacagtgaagcaagcttagtcaaagagcttgaaagcctcggtatcgggcgaccatcaacctatgcgtctattatctcaaccattcaagagcgtggctatgttaagcttgaaaataaacgcctatatgctgaaaaaatgggagatattgtgacagaaaggttggtagaaagtttccctgatttgatggattatgcctttaccgcagggcttgaagataagcttgatgaggtggcggttggcgaggaagattggaaaacggtgcttgacagattttatcatgatttcaaacaaaagcttgattatgccaaaaccaccgatggcatgcgtcctaataatccaaccaatgtgcctgatattcactgtgatttatgccatcgcccaatgcagatacgcacaggttcaacgggtgtatttttgggttgtacaggttataatctaccacccaaagaacgctgtaaaggtaccaaaaatttgatgccagtttcggcatttgagtttgatgctgatgatgattcagcagaggtcaacgccctcatggaaaaaaagcgttgcccaaaatgcaatactgcgatggatggctacattgtcgacggtgggctaaagctgcatatctgtggtaataaccctgattgcgatggtcatgtgcttgaaaaaggtgtatttgagattgggggtgcaaccagtgatacaccgaccattgattgtgataaatgcgatggtcaaatggagcttaaaacggggcgttttggtgcatattttgcttgccgaaagtgtgataatacccgaaaagtactcaaaaatggtcaggcggcccctcctcgtatgacacccattgatatgcccaagctgcgttcacaaaaatttgatgaccattatgtgctgcgtgaaggtgcagcagggctatttttggcggcatccaaatttcctaaagttcgtgaaactcgtccaccaaagctaagtgaacttcgtgagattaaagatcagcttgagccaaaattttattatttgtttgatgcaccagatacagatgatgttggtaacccaacaattttacgatggagccgtaaaaatcaagagcaatatgttggttcagaaaaagacggtaaagcgacccgtttcgccttggtttggcgtgatggtgcatgggtacaagcc

SEQ ID NO: 75 - DNA, 2877 bp, Moraxella catarrhalis
atgactgccatgacgaataccgcttacccaaatattaacagtatcccaagtcttgccaaactatccacagaccaagttgataccactcgtccgcctgtgattttggtagacggttcttattatttatttcgctgctttcatggtctaccaccgctatcaaattctcaaggattgccaaccaatgccatccgtggcgtactaaatgcactcaacaagctgattaaaaaatatcatcccacccatatggcagttgcatttgataccaaagcgcctacttttcgccacaatttgtccgaagcctataaagcacatcgtcctccgatggacgaagcattacgcatccaaattccttatattcatgagatgattgaaaaactgggcattgcactcattaagattgatggttttgaagcggatgatatcatcggcacattggcctatcaagcctgccaacaaggccatcgggtcatcatctccacaggcgataaagacatggctcagctggtgaatgattgtgtcatgcttgaagacagttttactggtaagttgaccgataacgcaggtgtgatagaaaaatttggtgtgaccagtgaacaaattgccgattatctggccttgatgggtgatgcgtctgatggtatttctggtattcctaaagttggtcaaaaaacagcggccaaattactcaatgaataccaaaatatcgatggcatcttagccaatcttgccaatatcaaaggggcagttggtaaaagcattgccgacaatcaagacagtattccactcaatcgcattttagcgaccatcgttaccaacctaaaacttgccataagctttgatgatattacgcttgaccacagccaagaaacaacaatcgagcgtgcacctgccttgtatgcactctttgaagaattagaatttaaaaaagaaatggctcaaaccgccgagctgcttaatttgccccatcagccaaccgataaagccgtatctattgatatccatgacaacaccctttcaagccaaaccccaatactacccatcaaagatatctcttatcacaccattacaacccaacaggattttaccaaactgttggataaattaaatcatacgccctactttgccattgacaccgaaaccactgatatcaattggcaacacgccaaactggttggcatttcagtgagcaccgctgattatgaaggctactacattcctgtcggccatacagcagattttgatgttttacttgataatcagttgccgattgataccgtattatcagcatttaaacccattttagaaaatccaaatatcggtaaaatcgggcaacacttaaagtatgatgcccatatttttaaaaagtatggcatcaacatatctccttggcaaatggataccatgcttgctagctatgtcatcaatgctgctgcaactcgtcatggtatggatgcactggctaagcattatttgggcgtacagaccacaacttttgaagatgttgcaggcaaaggtgccaaacagcttagttttgataaggtcgccatggatgcagcaagccagtatgcatgcgaagatgcagatattacctttcggctatttaatagatttaatcaacacatcaatcaagataaaacggctgcccaactgttataccatctagaaatgcccaccgcccaaattctaacccaaatggagcatgatggtattttaattgacactgattttttggggcaattatcagatgaatttgataaaaaaattatggcactacaaattgaggctgaacgcattgcagatgagccgtttaatttggcaagcccaaaacagcttggtgagattttatttgacaaactgggcattgcaggcggcaaaaaaaccaaaacagggcaatacgccacttcagaagctgtattatcaaaaattgaacatccgctgattgatgtggtacttgaacatcgcagcttatcaaaactcaaaagcacctataccgatacgctggcaaacgccgctgatgagcaagggcgagtccacaccagttaccatcaagcgcttaccagcacaggtcgcctgtcatcatccgatccaaatctacaaaatatccccattcgcacagatacggggcgactgattcgtgaggcatttatcgcaccaaaaggtcgtatgattttggcagcagattattcacaaattgagcttaggctgatggctcattttagcggtgatgaaagcttgatccgtgcttttaatcataatttagatattcatacggcaaccgccgctgagattatgggcaaagatatcagcgaagttacaccaagtgagcgacgcgctgctaaggcggttaattttgggctattatatggcatgagtgcttttgggcttgccaaacagattgaggttgatcgagccgttgcccaagattatatcaagcggtattttgcacgatatcccgccattttagagtatatggagcgtaccaagacgatggcaaaacagttaggctatgtgcagaccattttaggtcgtaaactctactcacctgatatccaaagtagcaatcgtatgattaaagatgctgccgagcgtgcagccattaatgcaccattacaaggctcagctgctgagattatcaaacttgccatgattgcggtggatgaagtattacccaaagatgatgccaagttgttactacaagtgcatgatgagctggtttttgaggttgatactgacaaggcacatgatatcggcaacctgatcaaaacagcgatgcaaaatgccctaaccgatacagcgaaaaagctgggctgggcggttgattttgctgtcccactcgtggttgaaataggtatcggtgaaaactgggagcaggcacac

SEQ ID NO: 76 - DNA, 1614 bp, Moraxella catarrhalis
atgtatacatcatctacaaaaaggcaagcaatgacaacccatttaaccaatgaaatcaaccaacgcagaacatttgccatcatcagccaccccgacgctggtaaaaccaccatgaccgaaaagctgctgctttggggcaaggcaattcaggtagcaggcgaggtgcgtggacgcaaagccgaccgccacgccacatccgattggatgagcatggagcaagagcgtggcatctctatcaccacatcggtcatgcaatttccctataaaaatcatgtggttaatctgctagataccccaggacacgccgatttttcagaagatacctaccgcacgctgaccgctgtggactctgcccttatggtgattgacggtgctaagggcgttgaggagcggacgattaagcttatggaggtgtgtcgcatgcgtgatacgcccatcatctcatttgtcaataaacttgaccgtgagattcaaaatccgcttgccttgcttgatgagatcgaaagcgtcctaaaaatcaaatgcgtgccatttgcttatcccattggtatgggtcaggactttgtgggggtatacagttttgtggataacaagacttacttttataaaaaaggctttggttcacaaattgtagagattgagagtaaagatggctatgatcatgctgacattaaggacaggcttgggcagattttatgggatgaatttatagaaaacattgaacttgcccaaatggcgtatgaagattgggatgagcgtgaatttttggcaggtcgtcaaacgcctgtgctgtttggtacggcgttaggcaattttggtgtgaacatgattttggatgtgctgacccaatatgcaccgcccccaaaagaccatgtggcagtagagcggacggtaaaagcggacgaacctgcctttacaggttttgtctttaaaatccaagccaacatggaccctaagcaccgagaccgtgtcgcctttatgcgagtatgttcgggcaaatacgagcgtggcatgaaaatgaaccatgtgcgtcttggcaaagaggtgcgagtgtcggacgctctcatgtttttggcaggcgaccgtgagacgctagatgaggcgtatgctggtgatatcattggtctgcacaatcatggcacgatacaaattggcgacagctttaccagtggcgagaccttgaattttacaggcattccgcactttgcccctgagctgtttcgccgtgtggtgctaaaagacccgatgaaatccaaacaattacaaaaaggcttacaacaactctcggaggagggggcaacccaagtgtttatgcctcaaatcaacaacgatttgattttgggggcggtgggcgtgctacaatttgaggtggtggcacacagattattagaagaatataaagtgcaatgcacctttgaaccgattagcattgcaacggtgcgatgggtttactctgatgataaagtcgcttttgaaaaatttaagaaaaaagcccacgaccagctgtcggtagacggcggtggttacctgacttatcttgctcccagccgtgtcaatttacaactcatgcaagagcgatatccagaggttgagtttcgggcaacaagggagcat

SEQ ID NO: 77 - DNA, 1527 bp, Moraxella catarrhalis
atgagcaaaagcatccaatccaatctttcatcaaaacacagtcaatcaacaacaccgcagcattatttacgcatttggcggtggcatttttatgcagggttatttgtcataccatttttggtgattttggccggcacagggcttggcatgattatattatccaatacggttggcaaacaaggtgagcttatcagcgtatcgccacaaaacaccagtatggcagtatctcatcaagctcacatcgccacatcaaacatcgctggcggacaagtgacgcaatacatcgctccaaaagatgatcatcatgccgccgcttttttagttaaaaatcatgatacgcaagttgccaactgggttgccatagacccctacacggcccaaatcgttggcacacaaccgcaaaaatctggcttatatcacacattagacagcattcatggtgatttattgatgggtaaaacaggagatttattgcttgaaacagcggcttctttaaccattttattaatcatcactggcatttatctttggtggcaaaaacgcaaaagtgtgataaaaatgctgaccgtacaagacaccaaaacaaaacgcaacttatggcgtgaaatacacgcagttttaggcagctggactgccattgtgttgttatttttttgtatcacaggcttggcttgggctgggatttggggagaaaaaatcatgcaagcatggaatcagtttcctgctggcaaatggggcgtagaacctgtacctacctccagtttacccgttgatactgcccatgatgacgcatcataccagcaacaaaatacagcagatacaccccatcatgccacagatatctcagcacccacacacggtgacgctcttaatgatggcacaaaacaagtgccctgggtacttgaaaaaacccccatgccaagctccacgcccacatcaaacgcatggcaaatgacgcaaccagacattgactttattgataacatggctaaaaacatgggctttgtgggacgatatcaaatcaactaccccaaaacaccaacaggcgtttggagcatcagccaagattcgatgagctatgacagccccaatccaaccgctgaccgcacagtacatattgaccgttattctggcgaggtattggcagacattcgctaccatgactattcagcatttggcaagtttatggcggttggtattgcactgcatatggggacagcaggaatttttagtattttggcaaacctcttattttgcttaagcgtcattgccatttgtatcagcggtcttgtgatgtggtggcaacgcagacccgccaccaacctgcataaaaacaacaaatccgctttaccgatgggcttaatccccccagccagtcaaaaaaacattcccatttggtggggttttggtggggtgttattgttaatttcagcactctttcccatggggttgtttgccatcttggttatcgtcattttagattggctcatcatcagccgagttccattattaagtaaactattaaaa

SEQ ID NO: 78 - DNA, 2967 bp, Moraxella catarrhalis
atgacaacacttcattcaagttttgagttaattgacaagcgtagcattgaagcacttgacatcacagttttgacatcacgccatcgtttaactggtgccatccattaccatttggcatgcgataacagtgaaaatgcattaatgattggctttgcaactcagccgatgacttctcgtggtgaggcacatattttagaacatgttgtgctgtgcggttctcaaaaatatcctgtgcgtgacccattttttagtatgattaagcgttctttgaacacttttatgaatgccatgacagcaagtgactggacagtttacccatttgctagtcaaaataaaaaagatttttttaatttattgtctgtttatttagatgcggtatttttccccaatattcatccgcttgattttgcccaagaaggcgttcgagttgagattaatcaagataaccagcctgagtatcatggcatcgtcttcaatgaaatgaaaggggcgatgagcggcgagattgatcagctgtattatgccttgatgccacatttattcccaacgaccacttatcattataattctggtggcgaccctgctcagattccaaagatgacgcatgaggatttggtggcatttcaccagacgcattatcatccaagcaatgccattatcatgagttttggtaatattgccgttgatgaaattcaagctaaaattcatgacgaggctttgtcgcattttgatgatattcaaaaacctgcacaaggcaaaaagttcacctccgtcattgaaaagccgttaagccagccgattcaggtgtatgatacatacagtgcagatagtgatgataaacagatgacccatcatgttttggcatggcttttgccaaccattaccgacccacgcctacgcctatcactgcggctgatggagggtgtgttagctgaacacagtggttcgcctttgcgtgcatatttagaaagtcatccgctggcagttgcacccagtcccttgcttgggctggatgatagccattaccaaatggtattttatgcaggggtgcgtggctcagagcctgaacacgccgaagtgttagaaaaggggattttggcactattaaaccaaattgcagacaacccaatttcccaagaagtcattgaaaccattttgcatcaaattgaaattgatcagcgtcatattggtggtgacagtatgccgtatggactgaccttgatgctagaggcatttagcaccgcagttcatggcggtaatcccttggatgtttggcagattgatgagcatttggcatggctaaaacaacaggcaggtgaaccaaattggctacaaaatttgattcgtcaatatttgattgacaatccgcaccgtgtacgcttaaccttatctgctgataccaaaaaagcggctcgattggttgatgaggaaaatcaagcactggcaacgcttgataccacgcttagtgatgatgataaacaaaatctgctcacacaagccgctcaattaaaagctcggcaagcagcccctgatgatgtgagtcttttgccaaaagttggacttgaggatattccaagtgaggtggcatttaccaagggcatcaaaacaaccttaagcttggatggtgaaacttatccagtgcatttgtatcatacaggcaccaatggattatattattatcaagtcatcacaccgctgaccgataaggtggcagatgaggtgattaataacccgctgctgccgctgtatttgacattgttatcggaagtgggaacaaacaactacgatgcccgtacttttcaggcggtgcaagcatcgcattcatctggcgtaaccgctcgtatcagtcaacggacacaattaaccgacaaagagtctttgagcagttattttgtggttgccacccgtgccttgaatcgtaaacttgaagccattgagctggtcagtgaggtgatgaatgagactgtatttagcgaaacagaccgtatccgagaactgttacaacaaaaacaaagtagctggcaggctcgtttggcaagtgcagggcatgcttacgccatgcaaaccgcttcttctcggatgagccgccaagcacgcattgagtatgcttattcaggattgcctgcgttggtagcactcaaatcatttttggcatcagcacaagccgatgacagcctatgggataccttatgccatcgactcagtgagttgcaccaaactttaataagcttgccaaaacaggtattgcttgtttgtgaagagcaggtaagtccagatttattagatgaaatctcaaaatatatcagcaccaaaaaaacacctgcaccaagtcaaaaagtatctcacaagctggtttttgatacactcgatgagctgttatgccaacaggatgaaccaaaaaccgcatggctaatctcaagcaatgtctattataatgcagctgcctatcaagcaacaacatcagagcatgaggatacgcctgctttaatggtacttgccccatttttaagaaatggttatttgcatggtgctattcgtgaaaaaggcggtgcttatggcagcggtgccagttttgatagcaatgctgctgcatttcggttttatagctaccgtgatccgcattgtgccaagacttttgcacattttgacaaaagtatcgattggcttttgcagacaaagcatgatactgagcaattgcacgaggcaattttagggattattgcaggtatggataaaccaggctcacctgctggtgaggcggtcaagtcatgttttaatgagctacatcatcgtgataaggcatggcaacaaaatctgcgtgccaaaattttggcagtcagtattgatgatttaaagtatgtggctcaaaaatatcttaaaaataagccaagtcatcaagcggtacttgcccccattgaacaagaattggcactcatcgatatgggctttaagattaaaaaattaagc

SEQ ID NO: 79 - DNA, 1218 bp, Moraxella catarrhalis
gtgagcatcagtgtagacactcttattatcggcgcaggggcatcggggctgttttgtgcttttaatacggcggcatatggcaaatcggtactcattattgatcacgccaataaagcgggcaaaaaaattcttatgtcaggtggcggtcgttgtaatttcgttaataaacaagttgaaccatgccattttatcagtcaaaatccgcattttgtcaaatctgccctatcaaaatatcagccagaagattttattgatttggtcaaccgccatcacattgcccatcaagagcgtgaacatggtcagctattttgtaaaaacagtgccaaagacattttatcaatgctactaaacgaatgccacatggcaggggttgatattcatctaaaaacaaccgtccaagatattcaagcaactgatactcattttttggtcactgtcaaatctcaacctgataatcgcatcaaagtcattcaagcacacactttagtcatagcaacaggcgggctatcaattccaacactgggtgcaagtggttttggttatcaagttgccatacagtttggacatcaaattattccaactcgtgcaggactagtcccttttactttcaccgataaagtcggcgagatgataaaatcattagcagggttaagccttgatgtgaccgcttataatgacaaagcatcgtttgacttaccgatattatttacacatcgtggtttgtcaggccctgccatattacaattatcaaatcactggcaagcaggcgagcaaattaccatcaacctagtccccacccaagatgtgtatcagtatctattagatgcaaagcgaatacaccctaagcaattactgcgaactgccctagcagccttattgcccaaaaaactcatcagtggatttgaacaattgttctggcaagcttatcaaaatattgaacttgccaatttaaaagatgaaaccatgcatcacattggtcagcagttaaatgcttggcaccttaaacccagtggcaccgaaggctatcgtgtcgcagaggtgactttgggcggtgttgatacgcatgatatctcaggaaaaaccatggaatcacgccgacagccaaatctgtattttatcggcgaggtgcttgatgtggcaggacagcttggcggctataactttacttgggcgtgggcaagtgcttatgcctgtgctcagagcattggggtgcggtgg

SEQ ID NO: 80 - DNA, 252 bp, Moraxella catarrhalis
atgcctttaacctgcttgacgctcgtggggcgattagcgttaccgaacgccaacgctttatcttgcgtgtacgcacactggcccgcaaagtggcaatcagctataccgaagctcgggcaaaattgggctttcctttggcagatgatgcccataagccagaagcgttggaaaaatggttgccaaaagaaccaaaaattatcttatgatacagtgaatattgtaaatacagtcaatccaagctgtatacctgaa

SEQ ID NO: 81 - DNA, 3531 bp, Moraxella catarrhalis
atgttgcttagcctaggcattttgcccataaggaacatcatgaaacgcatcttaattaacgccacacatagtgaagaaattcgtgttgcactgtgcaaagataaccatttatacgactttgacctagaaaatcgtactcgtgaacaaaaaaaagccaatatttataagggtcatatcactcgtgtagagccttctttggaagctgcatttgttgaatatggctcagcacgccaaggttttttaccactccgagaaatcgcccctgaatacctaaacggcaatactcatgaagacagcattaagcagctcatcaaagaaggtgatgaaatcatcgtccaagttgaaaaagaagagcgtggcaataaaggcgctgccttatccagctttatttcactggcgggcagatatttggtcttgatgccaaacaaccccaaagcaggtggcatcagccgtcaaatctcaggtaaagtccgtgaagaaatgaaacaaatcatcgcagggctaaacctaccaaaaaatatgagcgtgattgttcgcacagcagggcttggtaaaggggctgatgatttacaaaatgaccttgaccatcttttagatatttggaaatccatccaagaacaaaataaaaaacgcccaagcccttgcttggtacatcaagaagcgggcgtggtaactcgtgcggtccgtgactatttgcgtgatgacattggcgaggtttggattgacagtgaaaatgcttatgatgaagctgccaatttcatcaaagctgtcatgccgacccagcttagcaaactgcgtaaatacaccgattatgagccaatgtttgcccgttttggtattgagcgtcaaatcgaaaccgcctatcagcgtgaagtacgcttaccttctggtggttctattgtcattgaccaaactgaagctttggttgctattgatatcaattcatcaaaatccaccaagggctcagatgtcgccgaaaccgcctatcataccaatttagaagctgccgatgagattgctcgccagttgcgtttgcgtgatatgggtggtttgatcgtcattgattttattgatatgaacgacccacgccaccaaaaagatgtcgaaaaacgcctcatcgaagcaacacgccatgaccgtgcccgtgttcagttttctgagattagtaaatttggactgatgcagatgagccgacaacgcttgcgtccttctcttgaggaatctacaggctatatttgccctcggtgccacggtaatggcatgattcgagatttgcgttctttatcgctatctatcatgcgacaaattgaacaaattgctctcaaagaacgcatgggcgaaattcaagctgaagtcccaaccgacattgcggcatttttattaaatgaaaaacgagaaagtttggtttatttagagcaagacagcggtgcacgaatcaccattttaccacatgcacatcttgaaagcccaaattttagcctacactttaatcctgatggatttgctccgtcaagctatgaacgcattgctgacaccgaagaaaaagaaaatatcgaccgtggttatgaggtgaattggcaaacagaccacgaaaaatcagactcaaaccgttggcaaaaatctgacaataagcccatcaaaaaaaatacgaccgattcagaacccaagccaaccaaaccagaacctcaagcggttgcatggttgtcaaacttatttgcaccaaaaccacaagcgaaagttgctggcagtttaggtacagcagatgccgctttagcgattgaagcactggtaaatggcggtgcggtaagcctaggtgcagcaggccgtatggcaaatatccaagcaccatcagctgagccaaccccacgcccccaagcagaagataaacgccacaaaaaatctcgaaatgccaaaaaagaatctggcgaagagaccgccgcccaagcccaaccctctgaaaagacagacaaaaaaaccaaaaaagaacgcgacaaagaacagtatccaaagcgtgaagcaggctctcgccgagaatctcgtggtgagattgtgcgtggtgagacacttcataaaaccgaagaaaaagcagaaaaagcggataaagctgataagcccattcgtgccgataagcccaaatctgaaaaaaccgaaaagctaccacatcaaaaagcggccaatcctaaagaagtggtgctacatgtgagcagcattaaagcggctgaaaataatacgcaagtcatccatctttcattggatggcagtaagtctacaaaaccaacaaaagacgaaacatcaagtgccaaagatgatgccaaaattgcacctaaagcaaattccaatcaggcaataaaagcaccaaaagagccgatacctaccaaacccaagcacgaagctgagccgatcacacaatcagatgaatcaggtgagatgagtgcattacatacggtctctgctacgacaggggttgagcccaaactggctgaaaaaattcagacacttgccaaatctatgaataaggctaccaacgaccctagagtggtacaaatcgcccttcagcagacacaggctatcaatctcaatgcaataacagcaggggcgctcatcttgcgtgtcttaggtaaatcggcgacaggtaattttgtgaatgattttatcactgcaatgacaaaaatgtccacgcctgcacagtttgattttgccaactttggttattcaccgctggatacagccacaaaaaatgagtttggtaaactaactcaagcgaccgctcaagcatcagcgccacagggcagaaccgaggctataccacgcccaatcacacgccgtgctgccaatgaccctcgtggtcagcatcctgagtatattgaagcaaccagccctaacaatgatcaggtcagcaaaacaattgctcagcattctaatcaagccagtcctgatacttttgatcatgctgtcacaccagccgacaccaagcataaggaatcaaagacagcgaccgattcttcatccgactcagataacagccaacttagcaaagctgatgatgcggttgaacatcaaaccaatgatgccattgatgctacaacgctggctgcagagcaaatctctgacagcattggcgacaccgtcagtaagacaatggctgatatctcaaccgtcgtatcagaagcggctgatgatactgctaaaatggcagatttggatactcataaccaagtgaaacctgaaagtggtaaagacaaaaaagtcagccaaatcaaagagatcaccgctgaccaaaaaaccgaacgcaagaccaaggcaaatagctataaagatatgattgaaaatgtcgcaggtcagctacaacctcaggttggtattttaaatctgatggcaactaaacctgccaaagtgtccaaaccagccaaaacaagagcacctagaaagccaagcaaaaaaccaaccaaggtagaagtgcgtaagttatctaagcctgtggagccttctgagtcttctcctgctaaatcagcagatgattcagccaacaat

SEQ ID NO: 82 - DNA, 954 bp, Moraxella catarrhalis
atgataaactctcgcaaaatgctgcccttatttaaaaaactgcacaccaagcaaccgaaacttgcccagaaactttcactactcaccaacgcaagtgccattaccgccaatagtttggcattgggtgtacctgtcattggggcgggcttggctaagacactcactcgctcaaaattagccgatcaaaccatcatcacagctgccaatcgctggattcataccaataatttgttgattgataaggtcttacctcataaagattggcgtatttttttacccaaaaatttaaatcccaatggcaaatatctgctaatttgtaatcaccaatcttgggtagataccagcatcattcagtatatcagcgaaggtcggctgcccatcacccgattctttgccaagcatgaactgatttatatcccagttgttggtcaagccttttattttttagattttcccatgatgaaacgccataccaaagcacaaattgccaaaaaccctcaattggctcgccgtgatttggatgaagcattacgagcttgccaatctttgaaaaataagccttttgtcttactcaattatttagaaggaacacgctttactgctgagaaacacaccaagcaatcctctccgtataagcatctgttaagacctaaggcgggtggttttgcactggctttatccagccttggtgatgagattgatggtattttggatatgactttggtttatccagacggcgcaccgaaatacagcgacctttggtcaggtaaactgacacggctatcggtagatattgaatttatcagcccaaatgatgagttattaacagcacttaaacatggtgaatacgataccaatcaaaccatcaaacatgcactttatgcttggcttgatgaaatttggcaagccaaagataaaaaaataagtcaaagactggcggaatttcatcagtct

SEQ ID NO: 83 - DNA, 390 bp, Moraxella catarrhalis
atggcaaaagacactcgtagccgcaaaaaagtggctcgtcgttcggtatctgaaggtatcgcccatattcatgcgtcttttaataacaccattgtaacgattactgatcgtcaaggtaatgcattggcttgggccacttctggtggacaaggcttccgcggttcacgcaaatctacaccatttgcagctcaggttgcagctgaggttgctggtaaaacagcacaagaaacctatggtgttaagaatgttgatgtcttggtaaaaggtccaggaccaggtcgtgagtctgcggttcgtgcactgggtgcattgggttataaaattaatagcataagcgatgtaacaccaattccacacaacggttgccgcccacccaagaagcgccgcgtt

SEQ ID NO: 84 - DNA, 1407 bp, Moraxella catarrhalis
atgtcaaaaaaatatgccgtcgtcggtttgggcagctctggactgtcagctgtgaattttttggtcaatcacggtcacaaagttagcatcatcgatggtaatcccaatcctaccttggcagataaactgcccacaggcgttcattgtcattttggcagcttggacagtgaactcttaagctcagccgatcagatcatcataagccccggcatcgacccaagaacaccaagtattgccgctgccaaggctcaaggcattcctgttgtcagcgatgttcaattgttcattgatacactcaaagcacgagatttggctcaagcgacaaacacgccagtcatcgccatcacaggctcaaatgccaaaagcactgttacaacattggtgggcgagatggcaaaacgggcaggtatgattgttggtgtcggcggtaatattggcacgcctgcacttgaattattaacgatccaaaatatggatttggtggtgcttgagctgtcaagttttcagcttgagcatatctcaaatttggcagctcaaggggcaaccattttaaatctctccgctgatcatcttgatcggcacgatggcatggcggattatttggcacaaaaattgcgtatttttgagcattgccaaacggctatcatctgccaagatgacgctggtttggccaagcaatgcttgaccacactacaaagaattgccccaaatcacaccatcatcacaacaaatagcttacttagccaccaaacggcagatttttatttatttgatgatggtgatggcatggcattatatcatcaaaaagacaaactgttaccaatccatcaattaaaaatcaaaggcaagcacaacctactcaatgccttatctgcacttgccttaggcacagctgccaatctccccatggatgctatgcttgatacgcttaagactttcaaaggtctaccgcatcgctgtgagtatattgatgatattgatggcaaggcatattttaatgattcaaaaggtacaaacatcggctcaaccatggcagcaattgatgggcttggcacagtttatggcacatcatcactggcattgattttgggtgggcttggtaaaggtcaagatttcagtgagctgtcagcctatgttacacagtgggcggatagtgtgtatttaatcggtcaagacgccccgatgattgagcaagatttactcaaaggtgatgcacatttggtatctaaaatatatcaggttggtacacttgatcaggcagtattggcagccagtcaaagtactgctaaggctgtgcttttgtcgcctgcttgtgccagcatggatcaatttaaaaattataatgagcgaggtgataagtttgttaacatggttcacgctttagcccatccatgcaaacgccctgct

SEQ ID NO: 85 - DNA, 1047 bp, Moraxella catarrhalis
atgattcattttaaacacccaaagcaaatatcagcttggttgctcgttattatgatgagtgcaaccagtactgcccatgccaacgacagtgccatcaattcagcagaacagctgacaactcacatcaccacagccattaagcaaacaatcgtcaaaagcacagacaatgaccgtttatatcaagaccacgaccaacaagctgatggtgagattgttggtgtacgttcatttgatgatagctttagcaactgtcaaaatcagtttgccaatcggcaagcaccaaccctgatcggcaagcaaggtgaacggctgtctaccatggcgcgtgctttatgctttgaaggatttgccactttacattcaggcatcgctcgcacaccgctatggtcagcatctcatctgacccaagcacgcatcagccaagcccgaaccttggcgcgtgttgacagctttcacgcagagtccagactacctgctgatgagcgtgctgagctgtctgactatcgacgctcaggctatgatcgtggtcatatcgccccaaatggcgatatggccaccaccgaatcccaatatgatagctttagcctagccaatatcgcacctcaaaacggtgaacataaccgtcatctgtggcgtcatatcgaaacacagactcgtcaactggcaatcgagtatggggaggtttatgtcgtgacgggcgttgcttttttgggtaagacttctgagcgtattggcggacgagtgcttgtacccagtcatttttttaaggcggtatatattccaaaattatcggctgctggtgtctatttttcctcaaatgacagtagtgaaaattatcaaatcatcagcctagatgagctggctcgcctgacgggtatcaatgccatgccatcactacctactcagattcgccaaactgcctacgatttgcctagacctagcagcaataaaaacccagaacaaaaggtgcttgatcatcagccaagcagctggtttgatttggtcatcagtgccatgcgttatgtctttgaaacactaaaccgtact

SEQ ID NO: 86 - DNA, 1512 bp, Moraxella catarrhalis
atgtcatttgccaaagtttttacacgctcagttgttggtttacaagcgccacaagtatttgttgaagttcatctttctcaagggttgcctgctctgacgattgtcgggctgcctgaagcttcggtacgagaaagcaaagatcgggtacgctcagcactgattaactcaggatacgaatttcccaatcgccgtttgacaatcaatcttgcacctgccgacttgccaaaagatggggcaagactggatttaccaatcgcaatgggtattttggcagccagtggtcagattgatgataaggttttagcacagtttgaatttgtgggagagcttgcacttaatggagagcttagacctgtttctggtgcacttgccatcgctcgtgcaattaaatccagtccttgtgatggtaagcctcgtacgctgattatgccaagcattaatgctgatgaagcggtcaaagtgggcgatatgacggtgctggctgctgagaatttagagacggtttgtcgtcatttggatgtggtgagcggcatcagccaaaatcaagaacatctcttatcgcccgtaactttgccaagtcagcctcaagtgatgcagtatgcgtatgatttggcagatgtcaaagggcagcatcatgcacgccgagcacttgagattgcagcggctggcggtcattcgctattatttacaggatctccagggtcggggaagactttgatggcatcgcgtctgcccagtattttgccaccattgaccgatgcagagactttagaggtggcaagtatctattcaattgcaggtgtcaattatgcgtttggcgagcggccgtttcgtgccgtgcatcataccatctctgcgactgctttggttggtggcggctcaaaacccaaacctggtgagattagtttggctcataaaggagcgattttccttgatgagattccagaatttgatcgtaaaacacttgaaacattacgccaacccattgagtcaaaacagattaccatttctcgtgcaaatgctcaagtgtcatttcctgctgattttcagctgattgccgccatgaatccttgcccttgtgggtattatggcgataccacaaaccgttgccgctgtcgacctgagcaaattaaaaaatatcaagacaaactgtcagggccgttattagaccgcattgatttacatattactgtgcctgctttacccattgaggatttacaaaatgcaccaaagggcgagtcatcagatgatgttcgccaaagagttgtggcagcacgcaatatggcgattgctcgtcaaggtaaagccaattatgagctgacggtcaatgaacttgatcaatttgccatattgggtcaaaaagaacagcaaatgctcaaaatggctcaatcaaagcttaatttgtctgctcgcagttaccaccgtattttacgcgtagcacgcaccattgcagatttggccgccagtgagcacatcaaaacagcacatgtggcagaagctttaagctatcga

SEQ ID NO: 87 - DNA, 1041 bp, Moraxella catarrhalis
atgcaagatatttggcactatccaagagctgaactagcccaacaggtcatgggcttgtttaattccaatttatcacacgccttaaccttttttgcaccaaggcggaaaggcaagaccgaatttttactaaaagatattaagcctttagccattgaacaagattatcaagtattttatttcagctttttagacagtggcgaacaagcccaaaaacgctttatttatgagcttacagcctttggacaaggcaagataggcaaagccatcaatcagctatctagcgtggaaatacagggctttaaggctgaattacagcacttacagcatgatgatgtattgcacgcattgaatgccattgccaagcaaaacaaacgcacccttttactactggatgaaattcaagccttggcaggcgtggcatattatccaattatagccagcctaagaaccgccctagataccaataaagacaaaatcaaggtaatttttacaggttcaagccgtgagaatttacgcctaatgttttcatctgcccaagccccattttttcactatgggcaaaatgtagattttcctgacttgccaaaggcttttactgaccatttggcagatacattttatcataccaccaaacgccagcttgataaggatgcactatggcaagcgtttattgaattgaacaaaagcccccaaatggctagggctatgatagagaaaatggcacttaatccaaatctaagcctagatgatgccaagcaattattgattgatgatacagcacaatttaatgagtatttgcccacctatcgccaattaaccgccttacaacaagcggtattggtgttaatcgccatgggagaaaaccagccatacagccaagccaccaaagataggctgggcaaaaagctaggcatagagattaccacgcctgccattcaatccgccatccgttcgctatctaaaaaggggctgatattcaaaaaagacaatggcgtatatgaaattgatgacccattttttaatcagtgggtattagataat

SEQ ID NO: 88 - DNA, 2076 bp, Moraxella catarrhalis
atgtacaatctaaacgacctaaccaatatcgccaaaggcttatttggcaaactgataaaccaaggctttgacgccatcaccattcaccaatacaccgatacacaggggagtacgatttacgccaaagcacgcctaaaaaatgcacaaggtaaaaaacatatccgcccattcttttttgatatggataatcagtggaaaatgggcgaacccgtttttacacccaaccaaaagcccttgtattacttgcataagcttagccaagcacaaagcgtatggatttttgaaggtgagcaaaaagcggatttgatggataatttgggctacaccgccaccacaacaggcggtagcaacaccattatcacccacgatttacagcccttggcaggtaaaaaatgcatattatggcgtgataatgataacgctggtatttcatggctgggtacttttattcaagccttacaagtattatcaccaccgcccacaatccatattgttgatgtagataagctgggcttggtagaaaaaggcgatattgtcgattatatgcaagagtgcgattttgctaccatgcaagccaaattacaggctttgccaatgctggataatgaccacctaagccagctatcacacgccaccagcaccgccaaaacagcacaaaacaaccagccagcaaccgccacgcctgcatcaaaacaggatgaaccgtggggcgaaccgtcgccgttagacgacaaataccacaaagaaaatgattatccacttgatagctttggtagtgaattagcgggtgtaataacccaaatcgcctattatgcacaagtccccttggcggtagctggtcaaagtgtgcttggcgtgttatctgccattggtcagcgtatggcaaacgccccatttttaaacacccatatccctgccagcttgtttttaatcaccgaatttcccagcggtcaaggtaaatcacaggcgaccaaattggctaattatgaattggcagaatgggaaaaagaaaactatttaaactatttggcagtactcaatgactgggaacgccagccaccaaaagaaaaagccaataacccaaagccaaaaagccacacttacatggtatcagatggcacgatagaggcggttacagataagtttattttggatgaacaaaaggatgtttattggaatacggatgaagctgggcaattttttaatggatatagtatgaaatctgataccgctggtagtagcatttcaagcctaactaagctttgggatggtagcccagttagtaaaattagaagtcaaaggggcaaaactgggcaagatagaacaaatgcctatgatgcacgcctaacgctggatgttatggggcaacgggtaatattagaaccagctatgacagacccagtattaattaatcaaggctttttacctagggcgttactggcttgcccaaagagtttccaaggctacagaaaatataacacgcccgaacggatgaccgccagcccaagccaagattggcaattggtgaagtattatcaaaaatgcagggatttacttattggtaagcctgccaagcgtgaaaatatgccatttaaagaccaaaatgcaaagcaagccttagcggactatatgcaagatgtagaaaacaagcaacgcactggcgaaccatacgcccaaatccctgcatttgctgggcgtatgggcgaaaataccgcccgtattgcttgcctgctggcattattccaaggtgaaaagacggtaagcaaagaccatattatcaaggctagtaagctggtggatttttctattgcagaacgcttgaaatattgtgatattgtggacgacaacaaaggtgatgcagagctattaatagattggcttattaagcgtgctaagatgcacaaaaaatccagctttggttattctgaagtgcaaagcaccattagcccaaaagtacttagacaaaaggcggtttttgatttagcaatagattatttgctagaaaaacagcatatccgaatagcttatcaagatgattgtagatttattgagattaaccctaagttattaaccgcc

SEQ ID NO: 89 - DNA, 408 bp, Moraxella catarrhalis
atggtcaatcattatgaaataaaaaaattaaaaaaatggcttgaaatttatcactgcgactccaaaaagcaatcacaactttttaattttcctcttagtaaattgattaacggagtcattatgaaaattcgtccattgcatgaccgcatcgttgttcgtcgtaccgaagaagaacaaaaaacagctggcggtattttactaccaggttcggctgccgaaaaaccgcaacaaggcgaggtgattgccgcaggtaatggtttagtgcgtgagaatggcgaggttcgcccattggatgttgcagtcggtgatgtggtgttgtttggtcaatattcaggtcaaacagtcaaagttgatggtgaagagctattaattttaaaagaaagtgatgtcttaggtgtacttgaggct

SEQ ID NO: 90 - DNA, 1194 bp, Moraxella catarrhalis
atgagcaacaacagccattgtagtgatattattatcgtaggggcaggaccagcagggcttgctttttcaagattttttaagggtagtgatgtgcgtttgacgctgattgaaaaatcatcattagccgctttacaaaaccctgcctatgacggccgagagattgccttaaccaatacttccaaagaaatcctacaaaatctgggcgcttggcaaagatttgcccctgatgagatttatcctttaaaagatgctaaggtgtataacggtaatttaaattacgctctgcattttcaagtacctaagttaatgcacagacagcgttcgcttgaccgattgggtaatttgatctctaatcacaacatcaaaaaggcgttgtatgatgaagtggcaacgatggataatgtcacactcatcactgatgcaactgtcactgatgtgaatacagatgacaccaaagcctgcgtgactttgatgaatggcaagcagttgtatgcagatcttgtgattgctgccgacagtcgcctatctggcatgcggcgtatgcttggcattggggcacacatgcatgattttggtcgtacggtgatcgtatttcgagtcactcatccgttatcaaatcatggcacagctcaagaatgctttttgtatggtcgcactttggcactgctgccgctgaacgaaaccatgacaaattgtgtcattacgctagataatacacaagcagatgagctgttaaagatgactccagagcaattggctcacgaagctcaaagaatgtttggcgatggttttggtacatttacgattgcaggtacggtacatcattatccactgatgggcgttcatgcacataagtttcatgccaatcgggcagcactcattggtgatgcggcagtcggtatgcaccctgtgactgcacatggctataatttgggtctgcagagtgccaatactttggcaccactgattttacaagcacaccgccgtggcttggacatcggctcaaatcacctactatctatgtacaatcgtcgccatcaggcacataccagacctttatatcatggtacgaatgccatggtaaccgtatttacaacagatacgctgcccatgcgtacggtgcgtgatatggcgttgcgtcttagtaataacttccccccagttaagcattggattgccaaacagttggtaggc

SEQ ID NO: 91 - DNA, 1917 bp, Moraxella catarrhalis
atggtcgcaattaccctacctgatggtagtatcaaacaatttgacggtaacaccaccgtgatgcaagtggctcaaagtatcggtgctgggcttgccaaggccaccgtggcaggtcgggtgaatggtcggttggtcgatgccagcgaccccatcaccaccgatgccacggtagagataatcaccccaaaagatgatgcaggcgtggagattatccgtcattcaaccgcccaccttttaggtcatgcggtcaaacagctctaccctgatgttaaaatggtcatcgggcctgtcattgatgatggcttttattacgacatttatagcgaacgcccttttacccttgatgacatggcaaagattgaagctcgcatgacagaactcatcaaccaagattatgatgtcatcaaaaaaatgaccccacgagatgaagtcatcaaaacctttttggagcgtggtgagacttataaacttcgcttggtggaggacatgcctgatgaaacccacatgggcttgtatcaccatcaagaatacattgacatgtgccgaggcccacatgtgcccaacactcgctttttaaaggcgtttaaactcaccaaaatgagcggtgcgtactggcgtggcgacgccaaaaacgaacaattgcaacgcatctatggcacagcatgggcggacaaaaaacagcttaaagcctacttacaacgcctagaagaagccgaaaagcgagaccatcgcaaaatcggtaaagccttgaacttatttcacatgcaagagcaagcccccggcatggtgttttggcaccccaatggctggacaatctggcaagtacttgaacaatatatgcgaaaagtacaaaaagacaacggctatcttgaaatcaaaaccccgcaaattgtggacagaagcttatgggaaaaatcagggcattgggataactatggcgagatgatgttcaccaccgccagcgaaaaacgagattacgccatcaaaccgatgaactgcccttgtcatgtgcaggtgtttaatcaaggcttaaaatcctaccgtgatttgcccctacgcttggctgagtttggctcatgccaccgcaacgagccatcagggtctttgcatggcatcatgcgtgtgcgtggctttacccaagacgatgcccacatcttttgcaccaatgcccaaatcaggcaagaagcccttaattttatcaaacttacccttgatgtgtataaagactttggatttgaccacattcaaatgaagctgtccactcgcccagaaaaacgggtgggggcggacgagttgtgggacttggcagaacaagccctagccgacgccttagataacgctgggcttgactgggagctacaagcaggcgaaggggcgttttatggtcctaagattgagtttagcctacaagattgcattgggcgagtttggcaatgtggcacattacagttggactttaacctacctgaacgcttggacgctgagtttgtgggagaatcaggcgagcgtgaacgccctgtcatgctccaccgtgcgattttggggtcatttgaacgcttcattggcattttgattgaacattatgcaggtctcttccctgcgtggcttgccccccagcaagtggttgtgatgaacatcaccgacaagcaagctgacagcgtgggcgatgtggttagcaagctaaatgccaaaggctatcgtgccatcagtgatttgcgtaacgaaaaaattggctttaaaatccgtgaacgcactttagaacgcattccgtttatgctgattttgggtgataaagaagtggaatctggcacggtcaatgtgcgtacccgcacgggcgaaaacttaggcagtatgaaccttgacgactttatcgctgttttagataaggcgattgagaaaaaaggtcggctaaatttg

SEQ ID NO: 92 - DNA, 210 bp, Moraxella catarrhalis
gtgctttacaaccaaaaggccttcttcacacacgcggcatggctggatcaggctttcgcccattgtccaatattccccactgctgcctcccgtaggagtctgggccgtgtctcagtcccagtgtggctgatcatcctctcagaccagctacagatcgtcgccttggtaggcctttaccccaccaaccagctaatccgacttaggctcatc

SEQ ID NO: 93 - DNA, 2007 bp, Moraxella catarrhalis
atgaaaacagcaaataaattgaccatcaccgcactgcttgccacaatcagcattatgcaagctgcctgtgcacaaggtcatgccaacgacggtagtatttatcaattttttgatgtcgaacgccaaaaaagtagcccaaatgccctacgccaatacgaaaaaaatatgcaaggcacactatttgggatgtatcctacctattggcggctaaattataacctatctggtcaatcacccgaggcagtcaatcagtttgtccatcaatatccaagcactgtcatgagtgaaaaactcgccgctgactatgctgagattaaggctcgccaaggtgactatgcgtctgtgcgtgccgtagcagacagcattgaaaaccctgatgaatctgaagcttgtgcgattgccttaggatttaaccaaagtcgtgattcactgcgagctttataccaaaaacccaatgtatggctaaatactcaaatccgccaatctttatgtgataaactggccaccgaaatggtttataacccacgcatcaccaacatcgataaacatgaacaacttttgcgtatgctacgcattgataaacggcaactttctagccgccaagcacctttggataaaacgggcgatatcatctcattgcttggacaattaaacatatccgtcagctaccaaaccattaatgaaattcgcaataatcccaatgaatttttgacacgcttttctcaagaaagctacagcaacaccaatcaatatctatatgtttatgccatcagtttgctggcacaccgttcatactcagaagctgccatacagcttaattatgacattgctcaagacgaacttagaacacaaaagctcatctctgatatggctcgtcagtatgcttggcgtagcattgcggtcaagcgtatgaatatgaacaccgatgatggctatagtatggatgcggtacattggtttagaaatagcttgggtgaaacttttaattacgaagaagcagaagactatgcccaagcagcaatttattttggtcaatggtcagatgtcattacggcaattagtgccatgacagccgttgaacaacaagagcggatttggcagtattggctggctcgggcttatgaacagctgggtcagcaagccaaagcacagcatatttatcacaatcttgcaaaagggatcgattactatgggctacttgccaaagatcgcatcggacagcgtttaagtctatctgatattggtggcaatgtattaccatcaatcagcaccagcgatgaacagcgtatgatggcagatcagcactttgcccgtgcaatactactcatgcaaaacaatgccagccttgaacatattaatcgtgaatggaattgggcggtcaaaaaagcacgcgacttaggcaataccactttactgctgagtgccgccaaaaaagcccatgacttaggattttatcaccgtagcatccatgccatcgaaactaccgattatctccgtaatgccgcattatcacacccaaccccttatcaagacagtactttaaaacacagccgaaatgcaggtattgatcctgcttgggcgtatggcatcatgcgtcaagaaagccgatttcagccatctgctcaatctggtgcaggtgcaggtggtttgatgcaaatcattcccagcacagccacccaaattgcccgaagcttgggtgaatctacaggtaatatgagcaatcctgatactaatatacgctatggaacttggtttttaaatgatttggcaaaccgtgccagaggacaaattgcggtcgcaaccgcaagctataacgcaggtcctaatgctgctcgtcgctgggtaccaacacatggtgccatcagtgccgatcagtatgtagaagccatcgcatacgctgaaacccgagcttatgtcaagcatgttatggaaaatgcgacaatttatagcctacttttaggtcaatataccccaatttctcagcgtatgggtacagttagcccttac

SEQ ID NO: 94 - DNA, 879 bp, Moraxella catarrhalis
atgagtcaaacccaaccgacagagccagttatttggctaaagcgtgaagtaccgggcgttaaacgcacaaccgttccgacactaacggctgttgaaactgagccatcaaccgaatgcccaaactgccatgcactgattaccaataccgcattaatcttaaatcagtatgtatgccctgaatgtgatcatcatttgaccatgacggctcgccagcgtttggagtggtttttaagtagtgtagaaacagagcttggtcaagaatttataacaggcaacccattaaattttattgattctaagccatatcctgaacgtatgaaagaagctcaaaataagacgggtgagtctgaaggcttggtggtcatggcaggcaagcttaaacatttggatatcattgcttgtgcgtttgattttcggtttatgggcggttcgatgggttctgtcgtgggcgaccgctttgtacaagccgccgaaaaagccttgacagagaacaagcctttggtatgctttgctgcctcaggtggggctcgtatgcaagaaggcttattatcactgatgcaaatggcccgcacttcagcagctattgaaagattgaggctggcaggcgtaccttatgtggttattttgaccaaccctgtctatggtggtgtgacagcatctttggcaatgcttggcgatgtacatatcgccgaacctaaagcaatgattggctttgcaggtaagcgagtgattgagcagactgtgcgagaagtgctgggtgagccttttcagcgtgctgagtttttgcttgaaaaaggtacggtggatatggtggtgcatcgccatgagcttatcaataccacgcatcgtattttagcaaaactaacaaaatctgccgtt

SEQ ID NO: 95 - DNA, 1095 bp, Moraxella catarrhalis
atgatttctaaacaaattgtattgggcattacgctggtcattggtagcggcgtggctttttttgccttggcaaaaaatgacactcaaacaaccaaatcagtacaaacgccccagcagataccaagtgataccaaggtggcaaaacctgtggttcagcctttgacggcagatatagctaccgaagaaaagctacttgccgaaaagcagcgtgtgcgtgaagcacatacgcttcaaatgcaaaagcaagcggctgccttgcttgaagaacaaaataatgcacgcaaacaagcacttgaaaaagccagtgccgaagctaatggacgcatgacgaacgatacccaaacagtttcagcggacagtgctgccaaaagtgagttgatcgcagcaccaacagttcagacacgccccgaagcaatcgaagctgcccgtaaggccgaagaagccaaaaaggctgctgagatgcttaagaactctgaacaagaaacaaaggatgaaaaagccaaaaccgctgataaacccaccgaaaataaagctgaaaataaaaaagagaataaaaacacccaaaccaaagcacctgtgaaggcgggtactcacgatgttcagcgtggtgaaacttggcagggtattgcgaatcgttacggcatttcggttgccgccttggttgaagctaatggcgtgacacgcaatgatattttaagagcagagcgtcgtatcaagataccatctgcatctcaaatagctcgtttggagcgtgataataaagccagagaatccgcatctaaagacggtaataaaaaatctgacaatcagcctcaatctaagacagataaaaaaactgaatcaaaatctcaaagttcccaaacatctgagcggtacatggttcaagtggcaatctctccagataaagatcgggttgatgaggtggttaaaaagtatcgtgatgctggctataaagtcacaaccagcaatacaagtcgtgggttgcgtatcttggttggtaacgaaaaaacagaagaagaagcaaaagcactgcgtactaagattgccgcagattctcgtgtcccttcatcgggtgcttttgtgcataaagcccaa

SEQ ID NO: 96 - DNA, 456 bp, Moraxella catarrhalis
atgtttcataaaattaccttagctgctgcatgttttatgactgttattttagcaggttgcaacagctcagggactgccaccgccaataatccacaggttgaagaccgtgccaaactcatgaaagattggcgtcatgccaatgaaggtatgaaggcaatgattgaagacccaagtcgctttgatgccatcacctttaaagagcgagctgattttattgctgataccaatgccaccatgtgggtacactttgaaggagaaatggctcaaggtggtcatgctaaagatgagatatggacagaccctgaaggctttcaaaccaaaatcgaagcgtttaccagctcaattaatgcacttgccttggcagcatcagaagctgcctcggcggctgatgttgaagcaagctatggtgaaatggccagccagtgtggttcttgccataaggcttataagaaaaaa

SEQ ID NO: 97 - DNA, 2127 bp, Moraxella catarrhalis
atgaatttcttgataattggaagcaaaacagtcatgacggattcagccacctaccgccaatcatataccgccaaagtctttgatgagattttgacgatgcgtcctgacacgccaattttggattgtatcgccagccctgatgatttaaaggcattgacaaacgaccaattgattgagttggctgatgagttgcgtgcgtatttactttactcaacaggcgtaagcggagggcattttggtgccaatcttggcgtcgttgagctgacgattgcattacatgctgtgctaaataccccttatgataaacttgtttgggatgttgggcatcaagcttatgcgcataaagttttgacaggtcgccgtgaacgcctgccaagtatccgctcaaaagatggtctgaccgcctttcctgagcgtgaagaaagccagtatgatacctttggcgtgggtcactcatcaacctcaatatcagcagcgttagggatgagtttggcggcacgattacttggcgaaaatcgtaccgtggcagctgtgattggcgatggtgcgatgacaggcggtatggcatttgaggcgatgaatgatgccgtccaacaaaatgccgatttactggttgtcctaaatgataatgacatgtcaatctcagcggcaattggtggtttttcacgccatttggcaaagctatggcagcgtggacttgccatggatattgataagcatggtaatattttgatggtcaaacgcaccatctcctctgatgaccgccgtattcgtcactatttgcatatggcaaacggtgcttttgaagatgtttcaagtcgcctaccgagtaaaatcagcgaaaaaatcagtgagctttttcatggcgttacctcttcacctttgccagataaaattgctgaaaaaattggcgataaattatttgcagataatctatttaaagccattggttttacttatcttgggccgtatgatgggcatgatttacccaaactcatccaagtgcttgagcgtgccaaacagttaaaaggtgctatcttaattcatgtacacaccattaaaggtaagggttttttacctgccgaagctgatccgatcggctatcatgctatcggaaagttacccaaagcaggcaaaaatcaagcacccgcatctgcaccaactgccaaaaaatattcacagatttttggtgattggttattgcattgggcaaatattgatgagcgcttggttgccatcacgccagctatggcggaaggttcaggtatggttgagtatgccaccaaataccccaagcgattttttgatgtggcgattgccgaacagcatgcggtaactttggcggcaggcatggcaacttcaggcaaaattaaacctgtggttgcgatttattctacttttttgcagcggggttatgatcagctgattcatgatgtcgccctacaaaatcttgatgttacctttgctattgaccgtgcaggtttggtcggtgaagatggtgcgactcatgctggggtttttgatttggcatttttacgctgtgtgcctaatgtcatcatcgctgccccaagtgatgaacatgagtgccatcagttattgaacacttgttatcagtatgacggtgtggcagccgtacgctatcctcgtggtgttggcgtggggcgtaaggttgatatgacagatgagcattacccgattgggcgggccaatgtggtctggcagtcatcaaactttgatacaaaaagcaccaaaaaactggcagtattatcgttcggcactcgcctaaaagatgctctgaccgccgcccaaagactgtcagaaagtcaagcaatcgcttgtatcgtggtggatatgcgttgggttaagcctttggatgaggcacttattttaaggctgcttgagatgggtgttacgcatattgctactgttgaagagcatcaaatcacaggcggtgcaggcagtgcggtgaatgaattcatcgtaagcctacaagcgttggttaagctgttaaatatcggtatcaaagatgcgttcattcatcatgccagccatgaagaacagctgttgtattgccgattggatactgatggtatttatcaatctttaagtaatttaatcatcaaaaac

SEQ ID NO: 98 - DNA, 1440 bp, Moraxella catarrhalis
atgagtgcattacgccagacccaatcgcagttacagctttatgataccctaagtgccagcaagcgtccatttaaaccgattcatgcagggcaaattgggatttatgtgtgtggtatgacagtttatgactactgtcatatgggtcatgcgcgtgtcatggtggggtttgatgtgattgtacgctggcttagagccattggctatcaggttaattatgtacgaaatattacggatattgacgataaaattattcaaagagcctacgataacggcgagaccattaccgagctgaccgaccgcttcatcacagctatgcatcaagatgaacaatttttgggttgtcaatctcccaacatagaacctcgtgcgaccgaacatattgaaaatatgcagcatctgattgatgttttgctgacaaaaaacttggcctatcaaggcagtggcggcgatgtgtattatgcaatcgaaaaatttcctaattatggcaagctctccaagcgtcatgtagatgatatgcaagcaggtgcatcagagcgtgtgagtaccgcagaagataaacgccatccttttgattttgtattatggaaaaccgccaagccgtctgaaccacattggcaatcgccgtggggtttgggtcgacctggttggcatattgaatgtagtgccatgagtacttgctgtttgggcgaaacttttgacattcatggcggtgggcatgatctgcagtttccacatcacgaaaatgagattgcccaatctgaaggtgcaactggtaaaacctatgccaatcattggatgcatatggggtttattaatattgatggcgaaaaaatgagcaagtctttgggtaattttttcaccattcgtgaggttgtggataagtttcatcctgaaacgatacggttttttttattatccagtcattatcgcagtcctgttaatttttcagatacagcactcaaagaaagtcataccgcattatcacgcatctaccaatcactaaaatcggccgaaaactttggcgtcatatcaatcatgccaaatgcttgggagagtgaagcagggcaggcatttgccaaagcgatgaatgatgattttaatacccccaaagcggtgagcgtgctttttagcgttgttactgagattaatcgagccatgaaagcaggcgaataccaaaaagccactcaagaagcatcgacgctcaagacactggcctcggtgcttaatatcgcccaatcatcgccccatgagtttttgcaagccaatattggtaataagcctgatggcttaagtgatgccgagattgccaataaaatcgcccaaagacaacaagccaaagctcaaaaaaactttgccaaggcagatgcgatccgtgatgagcttaaccgtcaaggcattgagcttgaagatggtcgtatgggtacgacttggcgacggata

SEQ ID NO: 99 - DNA, 342 bp, Moraxella catarrhalis
gtgccaaaaatacccataataaaggctgattttatatatgagaacgctcttatgaaaatgttgatatggtcgctgatggttttgggtttggtcgtggcatcaaatgcgtatgctgatatcgaaaaaatatacgctcaaagctgtgcaacttgtcatgatagcggtacttttaatgcacccaaaaaaggtgatgttgccatatggcatcgcctaaatcagcaaaagggtcaagaggcattgattaaatcaatccgccaaggcatgccgcagatgcctgccatgggtctgtgccaaaattgcacagatgaagactttgctaagctgattgactatatgagcaga

SEQ ID NO: 100 - DNA, 726 bp, Moraxella catarrhalis
gtgagaaaaattatgcgtagcaacaatcgccaaaataacgagcttcgtcccattcattttatccgccaatataccaaacatgccgaaggttcggtattggtgtgttttggggataccaaagttttgtgtactgccagtatcgaagctggtgtgcctcgttggcttaaaggtcaaggtaagggctggctgaccgctgaatatggtatgttgccacgcgcgacaggtactcgtacacagcgtgaagcagcacggggcaagcaatcaggacgcacccaagagattcagcgtttgattggacgctcactgcgtgccatgcttgacttatcaaaacttggcgaaaataccatttatatcgattgtgatgttatacaggcagatggcggtacacgcacagccagtatcagtggtgctgcggtggcacttattgatgctttagaacacttgcagcgtcgtaaaaagcttacccaagatccgcttttgggcttggtggcagcggtttctgtgggtgttaatcaaggccgtgtattgcttgatttggattatgctgaagattcaacttgtgataccgatttaaatgtggtcatgacgcaggcaggtgggtttattgagattcaaggcacagcagaagaaaagccatttactcgtgctgaagctaatgcgatgcttgatttggcagagctgggaattgggcagattatcgaagcccaaaagcaagtattaggctgg

SEQ ID NO: 101 - DNA, 759 bp, Moraxella catarrhalis
gtgatgaaagctattaaattatctgtagtttctgctgcagttctactgtcaacttctgcaatggcaaatgttgttaccaatactggtgcgaccgttgttgacggtactcgtaccatctttagtacactggttaaacctgcagctgtgagtgctgaggttggtactttgggttatggtgctaacattggctgggcagtgaatgatactgttgagctacaagcaggttgggctggtggcaatatcgcaaaatctatcaatgataactttaatgccaatggcgttaactatcaacttgaaactgatttttctaacccatacttgggtgctcaagtgcgtcctgctgccaactggttcaccgttgggacaggtatcatcgtacctaagaacgacatcaaagtccgctcaaataacacaaccgatggtgttttccgtgttgatggtaaagactacaaacaaagtgatgtaggccagcttactggtaagcttgagcatcgtaacaaattagcaccttatttgacactgggtttccgcccaaatctacacagtaactggggtgtatttggtgaagttggtgctgcctatttgggcaaagtagatgctactgttgatgcacaaaatccaaccaaatcagtaactgctactgatagcaagacccaagaaactgtcattaaaattgcaaaacaagcagagcgtgacatcgaagataaaaaatatgccaactggttcccaatcgctaaagttggtgttacttaccgtttc

SEQ ID NO: 102 - DNA, 2601 bp, Moraxella catarrhalis
atgattatgacagatacagtacaaaaagatacagcacagtcccccaaaaaagtttatctaaaagactacacaccgccagtatatgcagttgataaagtggatttggatatccgcttgtttgatgatcatgctgtcgttggtgccaaacttaaaatgacacgagcacacgcaggcgatcttcggctttttgggcgagatttaaagcttaaaagcattcacctaaatggtcaggaattagagtcgcaggcgtatcatcttgataaggaaggcttaacaattttagatgcaccaaatgtcgcagtgattgagacattggttgagatttcaccacaaaccaacacaacacttgaagggctatatcaagcaggaacaggtgacgataagatgtttgtgacacaatgcgaacctgagggttttcgcaaaatcacctttttccctgaccgccctgatgttttgacagaatacaccacacgcctagaagcaccaaagcattttaaaaccttgcttgccaatggtaatttggttgagtcaggagatgtggatgaaaatcgccattataccatttggcatgatcctaccaaaaaacccagctatctattcgccgctgtcattgccaatctagaagtgcttcaagaccactatacaaccattgaaggtcgagaagttttgcttgaggtgtatgccgatgctcaagatattgataaatgtcatgttggtatgcaagcgctaaaagatgcgatgaagtgggatgaagataattatggtcgtgcttatgatttagatcgctatatgattgtggcgacaggtcagtttaatatgggtgcgatggaaaataagggtttaaatatctttaacaccagttgtgtattatcaagccccgaaacaacaactgacgaacgcagttttttggttaaatcggtgatcgctcatgagtactttcataactggacgggtaaccgcattacttgccgtgattggttccagttatgcctaaaagaaggatttactgtatttcgtgaccaaagtttttcaggtgattttcgctcaaaagcggttcagcgtatcgaagatgttgctgtattacgggcagcacagtttgctgaagatgcaggttcgttagcacaccctgttcgccctgagagctttgttgaaattaataacttttatacaatgaccatctatgaaaaaggtgcagagattgtccgtatgattgccaatttcttgggtaaagagaaatttcgccaaggttcggatgaatattttgctcgctatgatggtcaagcggtaaccgttgaagatttcttatctgcgatgtcagtggcagatgctcgagtgatggattttttagcgtggtatcgtcagccaggcacaccagttgtatcaggtggctatcgtgttcttggcgataaagttattattaatttatcccaaaaaacccgccatgtacctaattatgatgcacccgttgcactaccaatccccgtagatacggcaatttttgatagcctaacaggtgagatgttggcaagcagaatgttgcttttgacaacagataatgcacaatttgaatttgatcacattcagctgtctgatggtgctcatcctgtggtatcagtgttgcgtaatttttcagcacctgtcaagattgactttgattatacagatgaagatttggcaagtttggtggcgtttgaaagtgagggattcaaccgttggcaagcactgcaaatactgatgaatcgatggttatccggtagcgtagaggacgccactttaatcatttcagttatccaaaaagctgttgatgaattgattgaagatgatcctatgctggcagcacgattatttgatattccaagccaaaaagagcttgcgatggcttatgatgaaaattatgaccctatcagtgttaaagctcgccgagatgaattgattggcaaaattgctgatggtttgctagaaaataccaagctttggtatcaaaaattaccattacaagcgtatgaagacacaccgcaggcacgaggtcgccgtttattgcgtaatgttttattgaatttgcgtttgacggcaggcgatgagatggctcatcaagatgcttatcatcaatacgataatgcgtcttgcatgagtgagcgactgggtgctttgatggcaatgattgagcataatttggataaaaaagacagctatcttgatgatttttatgccaaatttagccatgaagatttggtgattgatgcttggtttgtcgcacaagcaacgccagatagtaccagtgtctctcaaatagcctcactcatggagcgtaccgattatgattggaacacaccaaatcgtgtacgcacgaccttaagtgctttggctgccaaacctgtgcaactttggacagctgagggtcttgatttgtatttgtcatcggttgtacgcttagatggtagcaatccgcagttggcggcacgcttgctttctgcgttggctcgttggaatactttgacagctgataaaaaagcgatggctcaagaaaaactggctgcagttacctctcaggtttcatcaaaaaatgtgcttgaatttttgcaaaatatgcaaacggtagca

SEQ ID NO: 103 - DNA, 1221 bp, Moraxella catarrhalis
atgaaacaattttttgcgttatctgtgttagccatgtcaatgagcacatcggcaaattatttaaccaattatcaagatccaaataccgatcagctcattcaagctctcaataataaccgcattcatatcgtacagctgggcgactcacatactgcaggcgacagcatgaccgaagcactacgtagtcagttacaaagtcgctatggtaacggtggtatgggctgggcgatgccgatgtattttagcggtcagcgtatggcacgctatggctatgataattatcaatggacacccatctcaagtcgccgcaatcaaaatgaggattatacattaggcggtttaatcgctaagccaaatttttcaggcagtacgctgactattaaagcaaaaaatcaagagcctatgcaatcaatgaccgtcagcattcgccaaagtgccactgatggcttatttaaaatcagtgatgcagatggcaatcatctgatacttgaagcaccgattaaaaacgatacttggcaaaccacaacttttgatgccaaattgccttttacgctcactgctgaaggcagtatgacaaataccgccattggtggctggtggggtaggtcaaaacatgaacttggtgccattgtctcatcgcttggtatcaatggtgcagagctatcacattggagccgctggaatcaaaacgcatggcaacaagagttggcaaccattgcacctgagctaatcatacttgcctatggcacaaatgaagcttataacaatcttagtgccgaacgcatcgctaccgtattagatgagcgtattgaacaaattcgtcaagcatcgccacattcagcgattatgattgtctcgtcgcctgaggtgctaaaaaatacagcaggcagctgcggtgtacgcccaccaactttacatgccattcaagaagtgcagcgtcaaactgcccaaaataaacacacgcttttttgggattggcaatcggccatgggtggcagctgctcaatgaagcagtggatgaaaagtggcaaagctaccaaagatggggtacattttacccatttaggttatcaacaattgggcaggcaaatggctgatgacattatctcattgtctgcattaaattcatcttcacacttaacaccaccgccacagatgatatccccatcacccatatcaattgcaccatctttatcaacaacacgcactttttatcaaaaa

SEQ ID NO: 104 - DNA, 1095 bp, Moraxella catarrhalis
atgcaaacttctaatcaaccaatctcaaaggtcgcccaaaccaagcaataccctgagcctaagcatattcggctaaagctgcgccccaagccttattttcacggcaaaagttacagctatttgctgatagtgctgtgcttatttgccacacttggtgtatggataatgcaaaattccattaatgcatattatctacaaacttatcacaaaagcagccctttaagcttacttgatcgttatcctgcttggaaaatgggtggtgatatcggcaataaactgtatgcttggcatggtgatttaaccagtgctattaaccagaaaaatcagcaaattgttgattattttaatgacaatttggcttatacccccaaatatcaggcaatgatggcaaaaagccttgaatctacgcccgctgcacagatggataatgttggcgtatcagaggccaaacctgacaatccttatgtaatacattcaggtgatgagattttttttgctggcgactcaatgatgcaaggcgtcgcaccgcatatccagcaatatcttcaaaaaaattacaacatcaaatccgtcaatcttgccaaacaaagtacaggtttggcttatccaagcctatttaattggccaaaaaccatcaaagagacactgtccatcaatgccaatatcaaaattttggttgtatttttggggcctaatgacccttgggatatgcctgatttggtcaatggcggtcaattaaaattccaaacgccagaatgggagatgggctaccgtcagcgtatgatggatattttggacagtgccaaaaatcacaatacgcaagtcatttggatcacaccgccaaatatgaaaaaacaaaagctcaataagcagatgatttatctaaatcagattatgcaagatgaactaaaacgccatcatgtacttatcattgattcacgcaagctattaggcacaagcgatgatatttataatgattatctgatacaagatggaaaaagcgttaaaatgcgtaccgctgatggtattcattttagtgtcaaaggacaaaagttaatcgcccaagctgtacaagatcaaatcaccatcatacca

SEQ ID NO: 105 - DNA, 1011 bp, Moraxella catarrhalis
atgacaggagttgctatgaataactttttaaaaacgaccctttgggcaagtttggtggcactaaccttggcggcatgtggtggtgataagcctaccgctcaagctgatttggctgccagccaagccaaaacagtggcaatcaccgccattgttgagcaccctgctttagatgccgctcgccaaggtgcgttagatcaattgactaaggaaggttttaaggaaggtgaaaatctgaccgtaaatttccaatctgcccaaggcaatatggcaacggcaggtcaaattgccagacagttcacctcggataatcccgaccttatttatgccattgccacaccgtcagcacaggctattgcagcggcaacccaggatattcctgtggtattttcggctgtcactgatccgatcgaagctcggttggttgcaaacctagaaaactcgggtaataacatcacgggcgcgtcagatgcgctgccttatgaaccccaaattgccttaatccaagagcttgtgccaactgttaaaaatgttggttatgtttttagcccaggcgaggtaaactcaactgtggtacttaaaacgctcaaagaaaaattagcaccgcttggtatcaatgtcatcgaagcacctgcccaaaaatctagcgatattactcaagctgccaactcattggttgggcgtgttgatgtgatttatacttcaacagataataatgtcattaatgcttatgaagcgttatatcaagttgcaaaaaccgccaaaattccattaatttcagcagataccagtactgttgagcgtggtgctgtggctgcactgggcgtcaattataccgatcttggcaaagaagctggtaaaatcattgcacgcatcttaaagggtgaaaaacctgctgatattcctgttcatatctctgaaaatctagacttgtatatcagcaaaaaacatgcggctgagcaaggtatcattttaccacaagcggtcattgatcgagctaccaaagtggttgaa

SEQ ID NO: 106 - DNA, 723 bp, Moraxella catarrhalis
atgaaagtacttaattcactgatcaaatttggtgcaggtgcggtattggcaacggttggtgcttttgccagtaccaacgccctagcctctggtggtcatggttgtggtgaatataccgaagctgatggtacggttgttaccttagaatgtagcaaagctccaattgatttaaccaacaaaggctcactgcaacgcggtgctgccatgtttatgaattattgtgcaggttgccactcagcccaatatgtgcgtcattcaagattggctcaagatttaaacatcccacctgaattggttgaaaaatatttgcttgtcacaggtgatgccattggtgaccatattaatgcagggattgacccagaactacaaagccaatggtttggtgctgcaccgcctgatttgtctttagagactcgcctgcgtggtgatgactgggtctatacttatttactgtcattctatgaagacccaagccgtccttggggggctaataacctagtacttgcaaatgcagccatgcctcatgttcttcataatctacaagaagaacttggcaaagaagaatatgaagcgcgtgttggcgatttggtcaacttcatggcatggatggctgaacctgttcgccatgaccgtaagatttatggtgcttttgttattttattcttattaattttattaattccagtttatctgctcaataaagaattctggaaagatgtcaaa

SEQ ID NO: 107 - DNA, 1896 bp, Moraxella catarrhalis
atgaatgcaatctcttatactcatcccaaaacatttgatgtcatcgtcatcggcggtggtcatgcaggcacagaagcatgccttgccgccgctcgcatgggtgctaataccctacttatcacgcataacattgagacgctcggacagatgagctgtaatcctgccattggcggtattggcaaatcgcatttggtgcgtgaggtggatgcacttggtggggcgatggcattggcaaccgataaggcaggcattcagtttcgggtgctaaacagccgtaaaggggcagcagtgcgagccacacgcgcccaagctgaccgtattttgtacaaggcagccattcgccacacgcttgaaaatcagccaaacctgacaatttttcagcaatctgtggatgacatcattgttgaaaatactcgtgcggtggcggtggtaacagccacaggcattcgtctaaatactcgtgcggtggtgctgacatcagggacatttttgggcggggtgattcatgtgggcttagaccatcaaagtggtggcagagcaggcgacatgcccgccattcgtcttgctgaccgtttgcgtgaattaaaactgcctgttggacgcctaaaaacaggcacgcctgctcgcattgatgctcgtacggtggatttctccgtgatgaccgtgcagtcaggcgatacacctttgcctgtcatgagttatatgggtgatgttgccatgcacccacgccaaatcaactgttatatcacccacaccaacgaacgcacgcatgagattatccgtgccaatcttgaccgctcccccatgtttagtggtaagattgagggggttgggccacgctattgcccgagtattgaagataagattcatcgttttgctgacaaagacagccatcagatttttattgaacctgaggggctaacaacccatgaattgtatcccaatggcatctcaacaagcctgccttttgatgttcagcttgaattcatccatagcatgaaagggcttgaaaacgcccacattacccgtccaggttatgccattgaatacgactattttgacccacaaaatctaaaaccgactttagagactaaatctattgatgccttgtattttgcagggcaaatcaatggcacaacaggctatgaagaggcagcagcacaggggttattggcaggtcttaatgccgcacgcatggcacttgatgagccatcatgggtaccacaaagacacgaggcttatctgggtgtgcttgttgatgacttgattacccatggcaccaaagagccataccgtatgttcacaagccgtgccgagcatcgcctgattttgcgtgaggataatgctgatgcacgcttgaccgccatcggacgagagcttgggttggtggacgatgaacgctgggcgagatttagtcaaaaaatggagtctattgccagcgaaaccgcccgcctaaaagacatttgggcgaccccaaacaatgccattggtcaagattttatggcaaacacaggtgagattttgaccaaagagaattcgttactggatttattaaaacgcccaaatatcacctttgacgacattgccaaagtgtcagacagtacagtgagtgctaaggtgggtgaacagattgagataagtgttaaatatcaaggttatattgagcgtcaaaatgatgagattgagcaaatgaaacgccttgaaaatacgctcttaccgcttgattttgactataaaagtgtgtctggtttatccaatgagattgtccaaaaattaagccaaatccgtccgacaacgcttgggcaggcaagtcgcatcagtggcgtcacccctgcggcggtcagtcttttggcgatgacgataaagaaacttaaaaaaacgcaagcagtgatgaca

SEQ ID NO: 108 - DNA, 966 bp, Moraxella catarrhalis
atgaatttacaaaaagttgacctaaatttattattttatttagatgtcttattacgagaaaaaaatgtcactcgtgcagctgaacagcttggcatcacgcagcctgcaatgagcaatattctacgccgactacgctcattatttaatgacccacttttggtgcgttcatctgagggcatgacaccaactgaacgagcttttgagttacagccacgcattcgtgaggtattgttagacatcacaacattacttgagccacgcaccgagtttcgtccatatagtacttctcgagtgtttcgcattatgaccagtgattatgcagaagcaacactggtacctcgtttggtgaaagcgttgcgtagtgaagcacctaatgttatcttggattttttgacgccatcagatgtctcttatcgagacatggagcaagggcgggtggatttggcgattaatcgctttaatgagataccacaaagctttcatcaagttttggtttggagagatacattcagctgccttttatcggcagacagttcctatgccaatcgttttaatttaaaaaattacctaaaagcacaccatatttgggtatcaaagacaggtatgggcgtgggatttggtgtcaatcctgaaaagtcaggtggtcttggctccattgaccaagcactccaaagacttggtcaaaagcggcaaatcagtgtatttactaggcattatcagatgcctgcaatgcttgttgcgaataaagatttaattgcaacactgcccacacgagtcgctcgcttacaagcagataatcatcctaatattatcatcaaagaaccgccattttttattcccgagtttgagctgaccatggcatggtcaccgcttcttcagcatcatcctgctcatcgctggttacgccagttaattttgcatgtggcacgacaagtcattgctgaagaaaatcaagtcatcaaagca

SEQ ID NO: 109 - DNA, 1449 bp, Moraxella catarrhalis
atgtcagaagaacaaaaaccaaagaaaaaaccccgccctgcccctgaaaaaatcattcccacctccaaagatatggatgcaaccaagcaccgtgtgcatccacgctttgctaagggcaaatataccaacattcgcctaattagcatgtatttgattttactgggatttttaatcgcaccttggcttcgttgggatggtagacaagcacttttatttgatgttatcgaacctaagttttatatttttggggcaacttttatgcctcaagatttttacttctttgcatttgtgtttatcattgccgctttaatgctatttatggtaactgtctatgctgggcgggtttggtgtggttacgcttgcccacaaaccatttatgtgcatctgtatcagcatgtagaaaaatggattcttggtgagcgtaacaagcgtattaaatttgataaaatgccttggaatgccgaaaaaattatcaaaactgcccttattcataccatttggggtgttttttctgcgattactgcggtaacttttattgcatttattgttggtacagactatttattttttaatggacaccctttattttttatgggttggggtaagatgacatggatattttttattctgattgtctttgttacccaaaccaacgcaggctatatgcgagagcatatgtgcgtgtacatttgcccctatggtcgcttccaatctgtcatgtttgacaaagacacattgattgtttcatatgattatgagcgtggtgagcctcgtggtgcgcgtaagaaagataccacacctgcaggctatggtgattgtgttgattgcaccatgtgtgttcaggtatgccccacaggcattgatatccgaaatgggcttcaggttgaatgtatccaatgcgccgcttgtattgatgcatgcaacgaaatcatggacaaagttggttacccacggggtttgattcgttatacaaccgaacgccaattggttgaaaaacaaaagaccaaaattatcggatggcgtatttttgcttatactggtgtacttttggcttgtatcattgctgcaacgatggtattggttagtcgtgcaccccttgagatggaaatccgccatgaccgtaaacaactctcaaccattaggcgtgatggcatggttgaaaatagctatgtcttaaaaattgtcaacaaaaccaatgaacgccaagtttatcaagttcgtttagatgcagagaatgcagctggcatgactttacgctcacgctttaaagaattaccattgcaagccagtgagctgtacgatttgcctgtcagcatcatcggcgacccaaatatcatcaagcctggcagcacacctgtaaccatcactgtatatagtaaagatggtcaatacagtgcatcagctcaagatgtctttatttacgaaccaaaaaaatccaagcagcccaaa

SEQ ID NO: 110 - DNA, 1065 bp, Moraxella catarrhalis
atgagctttttttggagttcttggattaccatcttatcattgggctgctggctattcatttttggtgttctggtatggaccttacgatctagaccagttcttgaagaagatgagaccacaggtcactcatatgatggcattcgagaatatgataaaccgctgccaaaatggtggttggtgattttctttggtacgatgatttggggcttgggttattttatcctttttccatcaattcagccaaatacatggaaaggcgtgacaaccgttgaggtggatggtgagtctgtaccttggacttctgccaatgaactaaacagccagcttcaagctaacaaccgtgtatttactgaaaattttgagcaaaatattttggaaaatgcaggtgcaagtgaggcaactgttgtccttgctaaactaaatgaccttcaatcacagcgtaaagctggcgaagaaaatgccgaactacaaacacagattgatgaacaagtcaaactgctggcaccttatgttgataagctggcatcagatccagaagcacaaaaaatcggtaaccgtttatttttacaaaactgtgctttatgccatggatctaatgcaagaggtgcacttggttatcctgatttgacagataatgattggttgtatggtggcaacgctgaccaaatcctactgacaattcataatggtcgtgttggttcaatggcagcatggcaacaacaactgggtgaatctggtgtccgtgccgcagcggaatatgtgcttcagctttctggtaatcaaaatgactatgagcttgatgctgctaaagttgcacaaggtaaagtattgtttgaggcaaattgtgtggtctgccatggtccagatgccaaaggcagcgctgccattggtgcaccaaatctaacggatgatatttggctatttggtggtgatcgtgatgccgtccaaacttccattcgccatggtcgtgctggtgtgatgccagaatggcaaaccaaattgggcaatgaacgcattatgctgctggcagcttatgtacgctcactatcacaaactgccgctgaa

SEQ ID NO: 111 - DNA, 2037 bp, Moraxella catarrhalis
atgaaaaaaacgaagttatttgccacagtaggggcagcagtattatcagcatctattttagctgcatgcagcaataatagcacgacagcatcacaaggtggcggtgatttaaccacctataaatatgtgttttcaggtgacccaaaatctttagactatatcttagccaaccaagctgttactgccgatgttaccactcagatggttgatggtttgctagaaaatgatgaatatggcaaccttgtcccttctttggcgactgattggagcgtttcagaagatggattaacttatacctacaccttgcgtgatggggtattttggtatacctcagatggcgaagaatatgcgcccgttactgcccatgactttgtgacaggtctaaaacatgccgttgacggtaaatctgatgcactttatgtggttgaagattctgtaaaaaacctaaaagcctataaagaaggtaaagtgaattgggaagaggttggcgttaaggctttagatgataaaactgtacaatacacgctaaaccaaccagaatcatattggaattctaaagtgacctatagcgtcctattccctgtgaatgctaagtttttacaatctaaaggtaaagattttggtgctttagatccttcatctattttggttaatggtgcttactttttaagtgcctatgcatcaaaatctttgatggaatttactaaaaatgataattattgggatgctgacaatgttcatgtacagtctgtcaagctaacctataccgatggctcagatcctggttcgtattatcgtaactttgataaaggcgagtttagcgttgcacgcttatatccaaatgacccaacttaccaagctgcccgtgaaaaatatcaagataacatcgtttatggcttgatagatggtacaacttattatttcacctttaacctaaatcgttctgcttttgccaatagcacaaaaacgacagagcaacaagaatctgccaaaaaggcaatgctgaacaaagatttccgtcaagcggttatgtttgcacttgatcgtgcagcttatcaagcacaaactgtcggtgaggaagccaaaaccaaggccttgcgtaatatgctggtaccgccaacttttgtgtctgccgatggtgaagactttgggcaaatggtgaaaaaagacttggtaggctatggtgcagaatggcaagatgtcgatttgtcagatagccaagatggtctatacaatccacaaaaagccaaagaagagtttgctaaagccagacaaactttagaagctcaaggcgtgactttccctatctatttggattttccaattgaccaagcagattcgaacagagttcagcaagctcaatcattcaagcaatcggttgaggcctcattgggtcaagaaaatatcatcatcaatgtcattgaaaccgagacctcaacttatgagtctcaaggctactatgctgaatcgccagagcagcaagattatgatattatgatggcaggttggggcccggattatcaagatccacgcacctatttggatatcatgagtcctattgatggtgccatgctacaaaaaacaggtatccacagaggtggcgataaagctttagttaaacaagttggtttggatacttatcaaacactgcttaatcaggcatcggtcatttctaatgataacagtgcgcgttataatgcctatgccaaagcacaggcattactgcttgacagtgctttacaaatcccaatggttgctattggtggtgtaccaagagtttctaaaggcgtaccatttagcggatcattttcttgggcgggcaataaaggcggtagctggtataagagattaaaactacaagcacagcctgtcacgactgagcaatatgagaaagcctatcaagcatggcaaagtgaaaaatcggcttctaatgccaaatatgctgacagccttgttaatcgtgtcaaaaaatcagatacagcagcaagcgatgctgcagcaactgatgctgcaaccacggatacgacaacagcgaat

SEQ ID NO: 112 - DNA, 483 bp, Moraxella catarrhalis
gtggaagctgagccaaatttatacacaaaaccgtttaaatttgagcttttaaataacaacatttggaggtattctatgaaaatcttagctttagcccctgcgactgccttggcacttgttggattcattggtgcagctcatgctcaagttgaccatgctcaagaagctcatgattctaccgtattaaagcgtcaagttacttatgcctgccaatcaggtgggcaagccaccgtaacttatggctttaaccaacaaagattgccaacttatgccagtgcttatgttgatggcaaaaaccgttttatgccatttaatttaaatcgttctgacaatgttgatagcgtttttggtgatgaaaataactacagcttgatgactgatgccatgacattgtataactatcacaaactaggcattaacatcacaagcccttctggtgattttgctcataaaggctgtaatgtcagatatgttacaaaactt

SEQ ID NO: 113 - DNA, 2634 bp, Moraxella catarrhalis
atgagccaaatttctttagaagattataatttttctgccatcgaaaaacaactacaaacccaatgggaaagcgacaaacgctaccacaccaataacgaaacaacggataaacccactcgctacatgctctcgatgttcccttacccaagcggcaagctacacatgggacatgtacgcaactatgccatcaccgatgtgcttagtcgctattatcgccaaaaaggctacgaagtcatgcagccaatggggtgggatgcttttggtctacctgccgaaaatgccgccatcgctaatgcggttgcacctgccaaatggacctttgacaatattgctaatatgcgtgaacagctcaaggcattaggactttcgattgattggtctcgtgaatttgcaacatgcacacctgaatattaccgctgggaacagtggctatttctacaattgtataaaaaaggcttggtatataaaaaacttgccaccgtcaattgggaccctgtggataataccgttcttgccaatgagcaagtggtcgatggtcgtggctggcgttcaggtgcgattgttgaaaagcgtgatatcccgatgtactactttaagatcactgattatgccgatgagctgttagatgacctaaaaaccttggaggggcattggccaaagcaagtactctctatgcagcaaaattggatcggtcgcagccaaggcatggagttggattttacttattcaatcgatgaccatgatgctgttttgcgtgtctttaccacacgccctgataccatcatgggggtcagttacttagcggtcgcagccgaacatccgcttgctcagcatgccgccaaacaaaacccagctatcgctgaattctgtgcagaatgtaaacaaggctcggtcgctgaagctgacattgccaaagctgaaaaagtcggtatcaatacaggcttgaccgcaaagcatcccatcacaggtaccgatgtgccagtatgggtagcaaactatgtactgatgagctatggctctggtgctgtcatggcagtacctgcacacgatgagcgtgattttgaatttgccaataagtacaatctgccaattccacaagtcattgattttaaggacaaaccaagtaactatagcaccaatcaatggcaagactggtacagtgataagacagggttttgtatcaattcaggcattttggacggcttgtcttatcatgacgcagtcaccaaagtcaatgaaatcatcaccgaaaaaggcttaggtcaaaccaccactcagtatcgcctgcgtgactggggcgtgagtcgtcagcgttattggggctgcccaattccgatggtaaactgcgaatactgtggtacagtgcctgtcgatgaagctgatttgcctgtggtgctgcccaccgatgttatccctgatgggcgtggcaacccactcaaaaatatgcccgaatttctacagaccacttgcccaaagtgcggtcagccagccgagcgtgaaaccgatacttttgatacatttgtagaatcaagctggtacgctcaacgttttgtatcaccacacgatgacagccaaatgattgagcgtactgctgccgataaatggctgcctgtcgaccaatatgtcggtggtgttgaacatgcggtactacatttactttatgcaagattttttcataaagtgatgcgtgatgaaggcttggtaagtaaagatgagccttttgccaatctgttggctcaagggatggttttggcaggtacttattatcgctcaaacagtgatggtagcacaacttactatttcccgcatgaaattgattttgtcatgaatggtaccgaaatcgaaggcgctaccttaaaagccgatggcaagcctgtcaccattggcaaaattgaaaaaatgagtaagtccaaaaataatggtgtcgaccctcaagaaattattgagcaatatggtgcagatactgtgcgtctttatacactatttaccgcaccagccgaccaaacacttgaatggtcagacagtgccttaaaaggtccacataattttatcaaaaaagtatggcgtaccgttggcgagcatttgtcagccattcaaaatcaccaatcaaatgatctaacaattaataaagacacgctttcaaaagatgccaaaaatctacgccgaaaaactcatgaaaccatcgctaaaatagatgtcagcttaggcgagcatttggcacttaatacgcctgtgtctagcctcatggagctttgtaatgaaattgcaagctttaaaccaactgataataatgacattgctgcacgccatgaagccatcgttgcgttattgacattgctatctttatatgctccacatgttggcgaatatttgttagaagcactaaaaatcgatgcacgcacccaagctttcccagtcttggataaatcagccttaatcaacgataccatcaccatggtggtgcaggttaatggtaaagtgcgtggtaagatggaggttgcctctggtacagatcaggccgagcttatccgtgaagccaagaatattgaaggtgtgtcgaagtatctcattggtgacattaaaaaagagattgtcgtacccaataaactcatcagctttgttgtggcgggtgct

SEQ ID NO: 114 - DNA, 1734 bp, Moraxella catarrhalis
atgtcccttaaacacaaccaaacccacaacaccacttttaccaaatttttaaagtccaacagcttttggtctaagggcttttggtctaaccgccatcaccgcaccaaagatttaaaagggttagatgcttatctgtttatggcaattgtggcgatatttttgaccacaactgccaatgtgacattttttcaacaagtcatgtcagtatacccattggcaaattacgcactttttatcgcttcattggcggtggtcttaacaggcgttttgttgctcttattggtgttgcttggctatcggcataccttaaagacggtggcaatttgttttattttaatcgctacttttgctggtcattttaccgacacctatggcactgtctacgacaccaccatgctacaaaatgccttacaaactgacacggcagaaaccaaagatttattaagcatgaagcttttaatccgtgttgtgttgttggctggtttgcccatctgttggattattgggcagccattgtcatttggcacactcaaagcaagtttaatgaagcggctggttacctatcttgtggctttggcattggttggcttgcccattttggcatttagcagtcaatacgccagtttttttagggaacataaaccgttgcgattttttaccaatcctgtaacggtgatgtattcagcaggcaaacttgccaatatgagttataaaaacgccaccaaacccaccgaaaccatcatgcacgccaatgatgccatacaaaaaaccaccgcttccactcgcaagcccagattggtggtgatggtggtgggtgagacggcccgtgctgaccatgcgtcttttaatggttatcagcgagccacttttccccacatggacaaactcattggcttagggcaagtgcataattttggtaatgtcacttcttgtggcacatcaacggcatattctgtcccatgtatgttcagttatttgggagcagaaaaatacgatgttgataccgccgattaccatgaaaatgtcattgacaccttagaccgcttgggtgtggcgatattgtggcgagataataactctgattcaaaaggcgtgatgaatcgcctgcctgccaaacagtatcaagactacaaaaacagccctcttcaaggtggcaataacaccatttgccacaccaacccttatgatgaatgccgtgatgtgggcatgttggtggatttagatgaccatgtcaaggctcatgccaatcaagacatattaatagtgttgcatcaaatgggcaaccatggccctgcttattataaacgctatgacgatgaatttgctcagtttttgcctgtttgtacaagtagcgagttggcagaatgtgagcgacaaacggtcattaatgcttatgacaatgcgttattggcgactgatgactttttaaaacaaaccatcgattggttggtagcacaaacacacgctgacaccgccatgttatatttaagcgaccatggtgaaagcttaggagaaaaaggcgtttatttacatggcatgcctaaggcgtttgccccaaaagaacaattgagcattcctgcgttactttggttgggagcagacagtccatttgcggtggcaaattcgccaacggctggctttagccacgatgccatcaccccgacactgctcaacttatttgatgtcagcacacaagccacggcagataaaacagcatttgttaatcctttggat

SEQ ID NO: 115 - DNA, 1770 bp, Moraxella catarrhalis
atgagtcaattttggattaatatcatttttgttagtttgtcatttgctctttattttggtattgcgatttgggctcgtgctggctctaccaaagaattttatgtggcaggcggtggtgtacaccctgttgttaatggtatggcaacggctgctgactggatgagtgcagcatcattcatctcaatggcgggtatgcttgccatgggtggttatgctgcctctgcatatctgatgggctggactggtggctttgttctgttggctttattgcttgcaccatatttgcgtaagtttggtaaatttaccgttcctgactttattggcgatcgtttttatagtaaaacagctcgcttagttgcagttgtctgcttgattttggcatgtacgacatatgttattggtcaaatgacaggtgcaggcgttgctttttctcgcttcctagaagttgatagcaacacaggtcttatcattgctgcgattgttgttttgttttatgcagttcttgggggcatgaaaggcatcacttatacccaagttgctcagtactgtgtactgatggttgcttatatcattcctgccatcttcatttctttgaacttaactggtaacccaattccccagctgggtatgtttggcaatgatgtcagtacaggtatgccaattctacaaaagcttgatatgctggttgctgaccttggctttgctcagtataccgctgatgtgccaaataagcttaatatgttcttattgaccatgtctttgatgattggtactgctggtttgccacatgttatcatccgcttttttaccgtgcctaaagtatcagatgcacgcatctcggcaggctggacattgatctttattgcactgttatacaccacagcacctgcagtaggttctatggcacgtctaaatattatcaatactgtttacccacaagggcttaatcagccagcattggcatacgaagcacgcccagagtggatgaaaaactgggaaacgactggtcttttgaaatatgaggacaaaaataatgacggcctaattcaatactataatgacaaaaatgaagaatatgcaacaaccgttactgccgagaaaggttggcaaggtaatgagctgactgccaataatgatatcttagtacttgctaatcctgaaattgcaaatctaccaagctgggtcattggtttgattgcagcaggtggtttggcagcggcattatccacagcagcaggtcttttattagcaatctcatcagccatctcacatgaccttattaagaaaaccatcaaacctgatatcaacgacaaaggtgaacttatggcggcacgcatctcaatgacgattgcgatcgtggttgcaacctatttaggcatgaatccaccaggatttactgcacaggttgttgctgtcgcctttggtattgctgcatcaagcttattcccagcactgatgatgggtattttctcaaaacgcatcaactcaacaggtgcaactgctggcatgattgcaggcttgagtgcaacatgtatctatgtatttttatacatgggctggttcttcattccaggcaccaatagttttgaaaatgtggaagccaactggatcttaggcgtctcgccactgtcatttggagccattggtgctgtaattaacttcattgttgcgatcgctgtatctgccatgggcaatccaccgccaaaagaagttcaagatttggttgaaagtgttcgttatccaaaaggtgcaggcggtgcaatcaaccac

SEQ ID NO: 116 - DNA, 2850 bp, Moraxella catarrhalis
atgtcatttaatgatttttcagaattattctatgaaaatgcttttgttcatcgtcatcttggtaaagatgccaatgaacaacaagccttattacaaaccgttggttttgatgatttggacagttttgttgatgctgtcgttcccaaagccgttcgtctgaataaagatttggatttaccagaggccatgagtgagcataacgccttggcaaaactgcgtgccatggcagataatattactgttgccaaaagctatatcggtcaaggttactcccccactcgcctgcctgcggtcatccaacgaaatgtgctagaaaaccccggttggtataccgcctatacgccctatcaagctgagattgcccaaggtcggcttgaagctttacttaatttccaacaagtttgtattgacctaactggcatggatttggcaggggcaagcctgctggatgaagcaaccgccgccgctgaggcgatggcgatggctaggcgtgtgagtaaatcaaaatccaacgccttttttgtggatgagcgtacctacccacagacccttgatgtcattcatactcgtgccaaatattttgggtttgatgtcgtggtaggtgattttgatgttgccaaaaatggtgagttttttggggcatttttccagtatgtcggtaaagatggcgatgtggtggacttgaccgatgtcatcaccgctgtcaaagacaacggagcttatgccatcgttgccagcgatatcatgagccttgtgcttttaaaatcccctgctgatatgggagctgatattgctttgggaagcacacagcgttttggcattccgatgggttttggtgggccacatgctgcctattttgcctttaaagacaaagacaaacgctcggcacctggtcgtatcattggcgtatcaaaagacgcccaaggtaatactgccctacgcatggcactacaaacccgtgaacaacatatccgccgtgaaaaggccaattcaaacatttgcacaagtcaagtactccttgccaatctggcaggcatgtacgccgtctatcacggggcggtagggctaaaacgcattgccacacgcattcacgccctagcggtcgcctttgccaaagcggtcaaatcatcagagctggcagtgcgtcatgatgtgttttttgataccgtactggttgaatgtggagggcaggcacaagcgatttttaagaccgccaaagacaaaggctacaacttatggcagcatgacaatggcggtatttctgtatcatttcatgaacttaccgatgaagcagaatttgatgaactgtgtcaaatctttggggtcaaaggcagtcttgatgccatccaaattcaattggacgatttattaagacaagatgacattttaacccatcctgtgtttaacagtcatcacaccgaacaccaaatgctacgctacctaaaatccttagaggataaggatttggcgatgaaccgttcaatgatttcactcggttcttgtaccatgaaattaaacgccaccagtgagatgttgcccatcacctgggatgagtttgcaaatgtgcacccatttgcacccagcggagacaccaaaggctacattcagatgattgagagcctacaagcccagctaaaagccatcacaggctttgatgaaatcagcatgcagcccaattcaggggcatctggtgaatatgcaggcttgctcgccattcgtcgctatcatgaaagtatgggtcaagatgagcgtaatgtctgcctaattccccgttcagcacatggcaccaatccagcaaccgctcagatgatgggcatgaaagtggttgtggttgcaaccgatgataatggcaatgtggacattgatgacctaaaagccaaatgtgatgaacatggcgataaattgggtgcgttgatgattacttatccatcaacgcatggggtttttgaagagggcattcgtgatatttgcgacatgattcacgctcacggcggacaagtgtatatggacggtgctaacatgaatgcacaagttggcatcatgcagccagccgatgtcggggcagatgtgctacacatgaatttacacaaaactttctgcattccacatggtggcggcgggcctggcatgggaccaattggtctaaaatcacacttagcaccttttatctcaaaccatcgcatcaaccctgtgtttaatgcccagtccgactgttcggcggtttcagccgctccttatggttcggcaaatatcctaccaatttcatggatgtatatcaccatgatgggtcgtgatggtcttttatcagccaccaaacaagcactgcttaacgccaattatattgcaaccaagctaagcgaagattatcctgttttatatactggtaaaaatgggcgtgtggcacatgaatgtatcattgacattcgcccattaaaagcacaaacaggcatctctgaaactgacattgccaagcgtttgatggattatggttttcatgcaccaaccatgtcatttcctgtggcaggcacgctcatgattgaaccaacagaatctgaaagcaaagcagagattgaccgcctcatcagtgccttaaagcaaatcaaacaagaggccttaaaggtgcaaacaggcgaagatggttggacaccagatgacaatccacttgtcaatgccccacacaccgcctttgttataacaggcgaatggacgcatccgtatagccgtgaagaagctgccttcccattgccttatatcaaggcacataagttctggccttcggtgggtcgggtggatgatgtttatggtgataaaaatctgatttgtgcttgcccgagcattgaaaattacgaa

SEQ ID NO: 117 - DNA, 273 bp, Moraxella catarrhalis
atgcttttggtcagttttttggtgtacaatcaatcaaattgctttttgccatgtctgacaaatggtaatttgagtacacgcacatccatctctttgccacgcatgataactttggcatgctcacctgtaaagctggcaggcacacgagcgatggcgatggattggtttagagttggggagaataccccgctggtggtgatgccagacccatcttcggtaatcacttccatgctagcacgaagtacaccgcctttggcaagtagtaacccaact

SEQ ID NO: 118 - DNA, 918 bp, Moraxella catarrhalis
atgattatgatgaaagtaccaaaccccaaacttttaacaacttcattgcttgttttaacttcagccatagcagtcttttctttttctgcttgctatcagattggggatgtggtgaatgaggcggcagctgaggcaacacagcaacccccaattagaactcccaagcagactgctaaattaaacgccttcgaaaattcaacctatcaaacagcaactgatgagctacttaaagcttataactggacattgatatctgccgaagtgcaaggagcaccaattcacagctacgaaaatattattaaaaatcgtgcagggagcttaagtttttcaaatcgtgggctttactttaatgtgggctgtaaccatcactctcaacattatcaattatctgaaggtgttttatcaattcatcacagaacatcaactttaatggcttgtcatcattctgacagtaactcacctgatttagctcaagttgaatcgaaatttgcacaggatttaaacggctcaaacctacaaattaaaactggtcctgacgaatacacagccaccttattactccaaaaaggtgctcaggtactcacttggcaaggtgatatgaaacctgaagttcgttttggggagtcagtattgctattttgggaaattgaaccaaataaaattaactgtattgatgaaattggtcaagagcaacgatgtttaaaagtgcgtaatgtcacttataatgaacaaggcattaagactggctctggtgcatggcgtaccttttatggtcaaattcatgagtatgagcatcagcctaatttgcgtcaaattattcgactaaatgcctacaataatcctgatagtaaagaaaacccatattatatctatgatagacctgttgaaatttactatttggatgttcccgtgtctcaa

SEQ ID NO: 119 - DNA, 1131 bp, Moraxella catarrhalis
atggcagaaaaaatggttgttggtttggttgggtggcgtggcatggttggctcagttttgatgagtcgcatggttgaagaaggcgattttcagcacattacgcctgtatttttttcaaccagcaatgctggtggtcaagcaccaagttttgatggtgtggacggcggtacgctcaaagatgcaactgatatcctagagttatctcgatgcgatgccatcatcacctgccaaggcggtgattatacaaagcaagtacacagtgcattgcgagatagtgggtggcatggctattggattgatgcagccagtagcctgcgtatgcaagaagatgccatcatcattctagaccccatcaatcgtgatgtcattgataaggcacttgctgatggtaaaaaagactttattggcggcaactgtacagtcagcctaatgctgatggcaattggcgagctattccgtcgtggttgggttgagtgggtatctgccatgacctatcaagccgcttcaggtgctggtgcgaataacatgcgtgaactcatcaaaggcatgggtgttctgcgtgattcggtgtcagatcagcttgatgaccccgcctcagccatccttgagattgatagaactattgctgatacacagcgtagcgacgattttcccaagcagcattttggtgctgtactggcaggcagtttaattccttacattgacagtcagctagataatggtcaatctcgtgaagaatggaaagctcaagctgaaaccaataaaatcttaggtaaatcagctgatgaaaccatcaatatcgatggtatttgtgtgcgtatcggtgccatgcgatgccacagccaagcacttaccatcaagctcaccaaagacattcccttggcagagattacaactgcactgcgtgaaagcaacaatccatggcttgatgttgttgaaaatgataaagccgccagcatggagcgtctgacccctgtggctgttacaggtacgctaaatgttgctgtgggtcgtctgcgtaaactgaatatgggcggtgaatacttgaccgcatttacagtcggtgatcagctgctttggggtgctgctgagcctttgcgtcgtatgcttgccatcctgcaaggtcgtatc

SEQ ID NO: 120 - DNA, 513 bp, Moraxella catarrhalis
atgaacttgtgtgctttgatgatggtattggtgattggcgtatcaaccaccgccgccgcaagctttgagctgtatgaatttgattcgcctcagcaagaggctcagtatcgagtactcatcgaagagttgcgttgcccaaaatgccaaaatcaaaatttggcaggctcagatgcacccatcgcccaagacttaaaacaaaaaacctatgaaatggtcaaagatggtcgtagtgatgctgagattcgtaattatatgtttgagcgttatggagattttatcagctataagccgcctgtgcgtccatctacatggattttatggttttttccacccattcttttgttacttttgctgttgggctggatttataaagcccaaaaaggtcgttcttggtctaagcaaatccccacaagtcatgcacctttatctgctggtgaagaagcaaaacttaaaaaaatcttggcacatcatcaaaataaatcgttggatggcagtgactcaaaaccaacaaaa

SEQ ID NO: 121 - DNA, 2439 bp, Moraxella catarrhalis
atgacaatcgcacagcagcactcaaacgcttgcgtactttggctaacaaacacccaaatcacgcccaaattgctgaacaaattcgtattgttgacaacggtggttattacatttggaatatcaaagatgatgacattcatgtcaagcccatcaaataatgcgttggtaagtctattatcttccgtacagtctcttgattgtacggattttttttattatgataaatcttggctgattgtagctgatttaaaccctgacgaaccgccatacgcttcaccagagaaatccatgcagactttatcaataaaaccaagtaaattacgcttaggtaagcttttgttgcctgccagcttaatgatgattttgagcgcttgtcatacgcttataccgcccaaacagacacctgccaaattacttgaaaaaacaagaagcagtatcattacaaacggtcgtgtcagtgcagcgacacaatctattttagtttcggcaggttatacccaagaaagttgcatggcggattttgaagcgtgtgttgatgatgttagatcaatttttttcatcgaaatgcccaatcgtttacaactgtctgtatttagtgagttgtattatacatatgctgacaatctcatcgccaaagatgcgtgtcgcatagagcttgccaggccgcccattgatccttattataccaatgcacccatcagtaaagacatcgctgaaaatcagcaaaaagctcgtactgagtgtcatgccaagtatcgagatgcactttatcaaactgtcaaatatagctatgcttatttattttattacagcttaggcggtcatggtactccctcatctcttccccaagagtctgatatccgaacgcttgatctttatcaccttgccatcaatgatttaatcactcaaatttatcgcaaagatcatggtgcgttttataatgccaaatttcaggatgtggtatcatctgagcaattagaacctatctacaatcagctaagaattggtcgtgttctcagcaatgaccacggtcaaaatacactgcatatctctgttggtgatcgtgattttttgacaagtaagctcaaacaacacgaacacagcagcgagctgttttctgagatgatttctgcttatgattctagattgctggatttggatgtcaatgcacgacgctcagggcttggtgtcagtttcgttggtgctatcaatgatcggcacaccaccagtattgataatctcaaaaagcttgcacgcaataaggccttagacgatcgcattcatcatgtcgggcacattcagctgaccgccatcatgaaacctacgggcaataccattgatgaggtactgtcatcacatgagttttatgcctatttttttaatccaagcaataacactcatgtcaaaatcggcgatacatcatatcctttgacagcgaatttttcagcgggctatgcgttgtggttggctgaaaatcagctaagacaagtctcgctgacgaatatgatttctcgttctgatgccatcgctttacctgaactatttatgctaaaaccgtataatcctgaccaaaaagtcatcattatgctgcatggtttggcatcaagccctgccacttgggtgaatcttaccaataccctactgaccgattctaagcttaatgaaaactatcaagtatggcaagttgcctatgcaactaacctgcccattttagaaaaccgctatcaaattcatgaattaatccgtcatacttttgccaagcttgaccccaatggacaagacaaagccagtcataatgcggttttaattgggcatagcatgggcggtgtcatctcaagattgctggtttctgataccgatttgacccaaaagcttcatacactcggtcataaggaacaatataagctgatcaatcatctatccgccgaccaacgccaaacactctccaatcgattagtattatcatcattaccacaagttgatgaagcgatttttttatcagcacctcatcgtggtacagattatgcagatcgctggtttactcgcgctgctcggcgtatcatcaaactgcctatcgaactgactagatcgcttagtacaatatttaccaatgatgttcaatcccaaagcttcttaggcactttataccttcaaaatggtgcaagccagttgtcagatcattcctcttttatggcactgaccaaagatattcaaattagcccatctgtgcgttatcatagcattatcggcaaccataccaataccaatcaacaaggtgacgctgtcggtaaaacaatttctgatggtatcgtaccttatacaagctcgcatcttgagggagcggcatctgaaattattgttgaaggtaaacacaacacacacgagaacccaaaaaccatcgtacagctgcgtaagattttacatgagcatttggatcaa

SEQ ID NO: 122 - DNA, 2757 bp, Moraxella catarrhalis
atgtcaaagcccgttttgtttgcaaattgcagttttatgcctgtcgcattggcggcttatttgcctttgatgacatcgcaagcattggcacaacaaaataactctgcaaacatcatcaatcatatacccgctcatgacaccgccatcaatcaagcaaaggcaggcaatccacctgttttgctaacacctgagcagatacaagcacgccttaatgctgctggactgaatgctaagccccaatcacaagctttggatgttgtcaattttgatgatcaatcgccgatatctcgtatcggtgagcaatcaccccctttgggtttggatatgtcggtcatcgaagaaaccacaccgctaagcttggaggaattatttgctcaagaatctactgagatgggaatcaatccaaatgattatattccagaatatcaaggcgagcaacctaatagtgaggtggttgtaccaccgacattagaacctgaaaaaccaggtttgatcaagcgtctttatgcacgcctatttaatgatggtgtcaataaggtgcctaggcttaaggcaaaattttatcaatcatcgcaatcaggcgaaaccagtgcgattgggtcatcgcatcaaaaaacagagccttatgcaaatatcaaagcagcacttgaagacatcacccaagagtcagcgatggatttgaatggctctatcccacgcctaaggcaaactgctttggtggcagcgcgtgctgtcggttattatgatattgatttatcaatcataagaaatagcatcggagaggtggatgtcatcatccatgatttaggtgaacctgtttatattgattatcgagcggtggaggtacgaggtgaaggtgctgatgataaagcatttactaccgtggcggatgaggtgccattgctgatcggcgatgtctttcatcatggcaagtacgaaaccaaaaaaaatctcatcgaaaatgccagtgctgaacatggatattttgatgggcgttggctggatcgttcagttgatgtaattttgccagataataccgctgatgtcagcttaatttatgatacaggtacgcagtatcgctttgatgaggtggtattttttaccattgatcctaaaaccaatcaattgacaaccgatccagataagctgccagttaaacgagaattacttgagcagttactcaccgttaacatgggagaggcttacaatttacaggcggtgcgtgcactttcaaatgatttgattgccacacggtattttaatatggtgaataccgagattgtctttccagagcgtgaacagatccaaaacgaccaagtgagctttgagcagtcttcaagtagccgtactgaaccagcacaagttgatgaaagcacacttgaacctgtcattgaaaccgttgagctaacggatgggatattaatggatatttcgcccatcgaatttagtgcatctaatctgattcaagacaagctaaatttggtggctgccaaggctcgccatttatatgacatgcctgatgatagggtgcttgccatcaatcatgatgatggcgtaaatcgctctattttgggcagaatcagcgatgccgtatctgccgttgcacgcgctattttacctgatgaatctgaaaatgaggtaatagatttgcccgagcgtaccgcattggctaatcgcaagacccctgccgatgtctatcaaagtaaaaaagtgccgctatatgtctttgtggcgagtgataaaccacgagatggtcaaattggtttgggctggggatcggacacaggtacccgcctagtcacaaaatttgagcataatttgattaatcgtgatggctatcaagcaggcgctgagctaagactgtctgaggataaaaaaggggtcaagttatatgccaccaaaccgcttagccaccctctaaatgatcagctaagagcaactttgggttatcaacaagaagtttttggtcactctaccaatggttttgatttatccacacgcaccctagagcatgagattagccgcagtattatccaaaatggtggctggaatcgtacttattcattgcgttatcgtcttgataagcttaaaacccaagcaccccctgaaacatggcaggatttaccagtggattttgtcaatggtaagccaagccaagaggcgttattggcaggtgttgctgtgcataaaacggttgcagataatttggttaatccgatgcgtggctatcgtcagcgatattctttagaggttggctcaagcggtttggtatcggatgctaatatggctattgctcgagctggtattagtggcgtgtatagttttggggataatgcttatggcagcaatcgtgcccatcagatgactggtggcatacaagtaggatacatttggtcggataattttaatcatgtgccatatcgtttgcgtttttttgctggtggcgaccaaagtattcgtggatatgcacatgacagtttatcacctatatcagataagggttatctgacaggcggtcaagtattggcggttggtacagctgaatataattatgaatttatgaaagatttgcgtttggcggtttttggtgatattggtaatgcttatgataaaggctttactaatgataccaaaattggtgcaggtgtcggtgttcgctgggcatcacctgtcggtcaagttcgtgttgatgtggcaactggtgtcaaagaagagggcaatcccattaagctgcatttttttattggcacaccattt

SEQ ID NO: 123 - DNA, 1710 bp, Moraxella catarrhalis
atgccacacattaccccaaaaaaccctgcgtttgattttaataaataccagccgtttgcgtttgcccctaagcttgaaaaccgtacttggcctgataagaccatcaccaaagctccaatttgggcaagtgttgatttgcgtgatggcaaccaagccttgattgatccgatgagcatcgaacaaaaattaaaattttttaaactgcttgtagagattggctttaaagaaattgaaatcggttttccgtcagcggcacaagttgagtttgattttacacgccgcttgattgaagagggtcttgtacctgatgatgtcaccttacaagtcttggtgcaggcgcgtgagcatttgattgatcgaacttttgaggcacttaaaggcgcacgccgtgcgattgtgcatgtgtataactccacctcaaaagtgcaaagagataaagtttatcagatggataaagcacaaattaaacaaatcgctatcgatggtgcgaccatgctgcgtgataaagcaaagcattatccagagacgcagtgggtgtttgaatattcgccagaaagcttcagccaaaccgaaaccgattatgccgttgaggtgtgtgatgcggtctgtgagatttggcggcctgacactgggcaagaagtgattttaaacttacctgccactgtcgaggcatcgacgccaaatatctatgccgaccaagtggaatatttttgccgacatctaaaagcacgcccccatgttaccatcagtctacatacgcacaatgaccgtggttgtgccgtggcggcctctgagctgggattgatggctggggctgatcgcatcgagggtacgcttttgggtaatggcgagcgtacgggcaatatggatattttggttatggcgatgaatctgtacacccaaggcattgacccagagcttgatttaagtcaggtcagcgacattgtacaaattgtcagcgaatgcaacaatctgccagtacatccacgccatccttatgttggcgaacttgtctttacggcatttagtggctcacatcaagatgccatcaaaaaatctttagattataatgaaaaacaccccgagacccagcagcattgggatgtggcatatctgcccatcgacccaatacacatcggtcgaggctatcaagatgtggtacggattaatagccagtcaggtaagggcggtgctgcgtatatcttgcagcggcattttggttttaatttaccacgctggacacagattgattttgcccgtgtggtacaggcttatgcagaaagtatggcgcgtgaactaaaaactgatgagctgcttgaaatttttacccaagcgtatcttaagcaagataaattccgcctaagcgactacaccatcagcaataaaggcgatgctgtcagcttccaaggccaagtggcgacacccaaagcggtgtttgaggtgattggtcaaggtaatggtgcgttatctgcgttcattgatggcttggtaaaatccacaggcagacagattcatgtcaccaattatgccgaacacgccatcgataacaaaacccatcaaaaaaccgatacagataaccaaaccgatgccgccgctgccgcttatatccagctgtcggtagaggggcagatttattcaggcatcgccacttgccatagcaccgtatcagccatgctaaaaggtgcgttatccgctttggcacaggcgtgg

SEQ ID NO: 124 - DNA, 2865 bp, Moraxella catarrhalis
atgaacaaaatttataaagtgaaaaaaaatgccgcaggtcactcggtggcatgttctgaatttgccaaaggccataccaaaaaggcagttttgggcagtttattgattgttggaatattgggtatggcaacgacggcgtctgcacaacaaccaaacaaccaagaactagccacaggcgcgcacatcggtggtggcgatgaaaaccaagccaaaggcaagtactctaccatcggtggtggctattctaatgtcaccgaagccaaaggcgcatactctaccatcgttggtggcaataataaccaagccgacggcacgcactctaccatcggtggtggctttactaaccaaaccgaaggtgcatactctaccatcgttggtggctttgctaaccaaaccaaaggcgcatactctaccatcgttggtggcaataataaccgagccgacggcacatactctgccatcggtggtggcgatgacaacgaagccaaaggcaataactcaacggttgcagggggctataaaaacgaagccataggcgacaactcaacggttgcaggtggttctaataaccaagctaaaggtgcaggttcatttgcagcaggtgtaggtaaccaagccaataccgacaacgccgtcgctctaggtaacaagaacaccatcaatggcgataactcagtagccatcggctctaataacaccgttgaaaaaggtcaaacaaatgtctttattcttggctctggcacatcacgcgcaaagagtaactcagtgctactgggtaatgggaccactggcaaagaagcgaccactgttgagcatgccacagtaaatggcttaaccctaacaggatttgcaggtgcatcaaaaactggtaatggtactgtatctgtcggtagtgagaataatgagcgtcaaatcgttaatgttggtgcaggtgagatcagtgctaagtcaacagatgctgttaatggctcacagctacatgctttagccacagctgttgctaaaaacaaagctgatatcaccaaaaatactgaaaatatcaaaaatctagaagtagcgacacttggtaaccatgcagatgttcaagagcttaaacgcaagcaagaaagcgacatcaaagatgttgttgaaatgcaaaacgcaatcgctgaacaagctgataaaaacaaaaatcatatccaagacctagcaaaagctcagctggctggtgtggcggttatggaagagctaaacaaacatgtcgaagatctgtatgaagccaccaatgataacttggataaaatctcacagctagatggtgcagtgtttaacaatacacaaaacattgccaaaaatagcaatcatatcaaaacacttgaaagcaatgtcgaagaaggtttgttggatctaagcggtcgcctcattgatcaaaaagcagatattgataataacatcaacaatatctatgagctggcacaacagcaagatcagcatagctctgatatcaaaatacttaaaaacaatgtcgaagaaggtttgttggatctaagcggtcgcctcattgatcaaaaagcagatcttacgaaagatatcaaaacacttgaaaataatgtcgaagaaggtttgttggatctaagcggtcgcctcattgatcaaaaagcagatcttacgaaagacatcaaaacacttgaaagcaatgtcgaagaaggtttgttggatctaagcggtcgcctcattgatcaaaaagcagatattgctaaaaaccaagctgacattgctcaaaaccaaacagacatccaagatctggccgcttacaacgagctacaagaccagtatgctcaaaagcaaaccgaagcgattgacgctctaaataaagcaagctctgcaaatactgatcgtattgctactgctgaattgggtatcgctgagaacaaaaaagacgctcagatcgccaaagcacaagccaatgaaaataaagacggcattgctaaaaaccaagctgatatccagttgcacgataaaaaaatcaccaatctaggtatccttcacagcatggttgcaagagcggtaggaaataacacacaaggtgttgctaccaacaaagctgacattgctaaaaaccaagcagatattgctaataacatcaaaaatatctatgagctggcacaacagcaagatcagcatagctctgatatcaaaaccttggcaaaagtaagtgctgccaatactgatcgtattgctaaaaacaaagctgaagctgatgcaagttttgaaacgctcaccaaaaatcaaaatactttgattgagcaaggtgaagcattggttgagcaaaataaagccatcaatcaagagcttgaagggtttgcggctcatgcagatgttcaagataagcaaattttacaaaaccaagctgatatcactaccaataagaccgctattgaacaaaatatcaatagaactgttgccaatgggtttgagattgagaaaaataaagctggtattgctaccaataagcaagagcttattcttcaaaatgatcgattaaatcgaattaatgagacaaataatcatcaggatcagaagattgatcaattaggttatgcactaaaagagcagggtcagcattttaataatcgtattagtgctgttgagcgtcaaacagctggaggtattgcaaatgctatcgcaattgcaactttaccatcgcccagtagagcaggtgagcatcatgtcttatttggttcaggttatcacaatggtcaagctgcggtatcattgggcgcggctgggttaagtgatacaggaaaatcaacttataagattggtctaagctggtcagatgcaggtggattatctggtggtgttggtggcagttaccgctggaaa

SEQ ID NO: 125 - DNA, 198 bp, Moraxella catarrhalis
atgagactaccaccctttaccaatgccaaaatcagcccaaacacgccaatgagcacaccaaaggcaagtggatgccctcctgccgctaccacgatgggaatgagtggaagaagagggccatgcgtgcctggtaaattagatgtcggtaggataaatgatgagaaaataagtacaaaaaatgcagcaataatcatctca

SEQ ID NO: 126 - DNA, 375 bp, Moraxella catarrhalis
atgattttactacttgttacttcatcaccacacagccatgcaggcaaacttgcagttgaatacgcaaccaagcaattacacttgggtaatcagatttcggtatttttttatggcgatggggcttataccgccaatcgactgatgtggcaaactgccgatgtaccaagcgttgctaagcaatggcaagcattatcaaataatcatggcatcaccctgcccgtctgcgttagtaccgctttggctcgaggtgtctgtgatgcccaaaatgccactcgccatgggctaatcggtgataatctgttgccaccgttttctttggttggactgtctgagcttgctatgatgattgatgatacaacatcagtggtacagttt

SEQ ID NO: 127 - DNA, 2811 bp, Moraxella catarrhalis
atggtttctttgcattttatgcccaatcaagctcagcttgactgcttatcactggcaagcccatttgcatctcaaatttatcaaaaacacagcgatgacgcccaagcatttttgggagaatatggttttgagcgaagcttgtcaagcttagattttgatgcattggttcgtcgttttgttgggcttggtaagaccaattatcttgattttaccaatgaagagatggtcatgtcaggactgcgtaagctacgccaaatgctgatgcttaagtggatttggcaagatgccttgtcggtgatttctttggaagagttgacgcatgagttgtctgattttgccgacagctgtatccagttttcaaaggattttgtgtatcacaagctgaccaaacgctatggcgagcctatgattcgccaaaaaaataaaacactcaaagatgaacttgccatcatcgctatggggaaattgggcgcacaagagttgaatttatccagtgatatcgatctaatttttgtgcatatcaataatggtgaaacgaacggcaaaaaagtcattgataattataaattcatgcgtgatcttgggcgtggcataattaagcttttggatgaaaataccgaacatggttttgtctttcgagtggatatgcgtctgcgtccttggggggatggctcaccgctggtgatgcatatggcggcattggataaatattttagccaacatgggcggacttgggagcgttttgcttggctaaaggcgcgcgtggtcaatgacattagcgatgaatttgggcaaacgcttaatcaattatcaagaaattttgtgcatcgctattatattgattatagtgcatttagtgcattgcgtgaaatgaaagccatgatcatcaatcagcaaatccaaagacaggatttggataatgtcaagcttggcgtaggcggtattcgtgatattgaatttattgttcaagcgtttgccctgatttatggcggtcaccatattcgtattgctgaaaatcctgcatgtcttgactgtttgacggtattaaccgagcttgattatattgataatgatgaaagcaaacaactggcagcggcgtaccgatttttacgccgtttagaacacgctatccaagcacgatatgaccaacaaacccagtgcctgccaagtgattctgatgagatgcttgccatcgcacagaccttaggctatgagtcggttaaggcatttcgctcggtgctggatgcacatcgtcataatgtcagcagaccgtttggacgcatggtaacagataggcaatcccccaagcaagaaagcttggatattgctcagattcggtcgtcattggatgatgtgttgggggataattcagcagtcgtgctcgatgagtttatgagttctcggctggtgatggggcttgatgatgtcgcaaaagatcggcttaatcaagcctaccccattattttgcatgctttattggcacatgcccaaaaagatggtgcagagtcggcaaaaatcgccttacccagattgattgcgttattagaggccatttgtcgtaggtcaatttatttggtgatgttgagcgaaaatccagatgcaacggtgcgtttaattccaacactatcagcaagcttatggatcgcccgagagcttgcacattatcctgtactgcttgatacattccttcaaaagcgttatttgcatttgcctgataaagctgagcttaccgacattctaagacaaagcttgcttagagtagagccttttgatgatgagggctatttgaccaccatacgattattcaaaaaaactcaagttttagcagtagccaccgccgatgtattaggtttgcggcacaccatgaaagtatctgacagtttgacttatatcgctgaagtggtacttgagtcggcattgtatcgagtatttcatgagttgtctgtcaagcacggctttcctttgttaaatactcatgagcgtgcaagcatcgctgattgtggctttgcaatcattggttatggaaaattaggcggtcttgagatgggttatgcatcggatttggatttggtgtttttgcatcgcattgacgaaaaaagcgaaaccgatggcgaaaagccaatcagtggcatgaaatttgcttctcgcttgatccaaaaactcatgaactatctggcaacccaaacccgtgatgggcgtgcttatgagattgatacacgcttacgaccctcaggcaatgctggcgtgccagtgatttctgcccatgcttttaagatgtatcaaacagacaaagcttgggcttgggagcatcaagctttggttcgggcaagagggttgacgggcgatgtgttggtactacaagcatttgaccgtattcgcaagcaggtcttaaccacgcccagacaagagacacaggtacgacaaaatgtcattgaaatgcgtcaaaaaatgcaacatcatttgggtacaaaaacgatgcggcgtgcgtatggcgagactgagcagtttaatctaaaacaagattttggtggcctgatagatattgagtttttggctcaatttatggtgcttgcctatgcaaataagtacccaaatttggcaatttggccagataatgtacgcatttttgaggaagttgaaaaaacgggtatttggaccgccaatcgctgtcaaaagctgacacaagcttatttggacttgcgtaaaaaaacccacgaacttgccttgtctgaacaaaaaaatatcgtcgatgatcaagcgtggcatgagctacgccaatttgtgcgagaggtttgggaagatgtcttaggc

SEQ ID NO: 128 - DNA, 1809 bp, Moraxella catarrhalis
atgacaaatcatccaagcgattttgccaatctgcctcactcatcgtatttatcactgctttgtcaagcggattcatcactcactccttcaaatttcatcagtatgcaagatttacttgcatatcaaaatcttaattcattaatcaaatttgtaaagtataacttgcaattgatgattttatggcataaaatcatcaattgcaatacaggatatattaccatgaatgacccacaaaataccatcataaaacaaggtttgcgactaaaattacggcgaaaagctttggggctatcagctgaagccttggcatctaagatgagtgagcttggcgtgcctgtcagtcgtggtgcgatcgccaattgggaatgcggtaaaaatggcattgtcatgagtaaattacccatattagcggcagctttgggtgtcagtgaaagttatcttataagtggtgatcatttgaccttacagacaaccaaacaaaaaaccgttaatgaaatttggccaaaatcaaccctcatcaaatcatctgttaatcaaacgcccattattttatcatcggaatacgccatcatgccccaaaccaagcccttaaaaaaatccaataaacttgccaatgtttgctacgatattcgtggtgagttactacaaaccgccaaccgtatggaagctgaaggccagcggattattaagctcaacatcggtaatcctgccccttttgggctattagctcctgaagaaattgttcgtgatgtggcgcttaatttgcctgaagcatctggatattctgattctcaaggaattttttccgccagaaaagcgatattgcaatattatcaaggcaaggggctgttatctgcgatagatgtcaatgatgtttatatcggtaatggtgtcagtgaattgattgtcatgaccatgcaagcgctacttgatgacgatgatgagattttaattccgatgcctgattatcctttgtggacggcagcggcaaatttagcaggcggtaaagcggtacattatcgctgtcttgaagatgatcattggcaaccagacttaaaagacattgaaagcaaaatcacatcacgcaccaagggtattgttatcattaaccccaataatccaacaggtgcggtctatactgatgaaatcctaaaaagcattgttgcacttgccaaaaaatatgatttggtgattatggcagatgaaatttatgaccgcattttatatgatggcgtcacgcatacccccatgtgtacaatcacaaatgattgtttggttctaacctataatgggctatccaagtcacatcgcattgcaggctatcgcgcaggctggcttatggtttcgggcaaaaaacaccatgccaccgattttattgaagggctgaccatgctggcaagtatgcgtctgtgtgccaatgttcccgcccagtacgccatccaaacagccatgggcggctatcaatcaatgcaagatttgactgcaccgacaggacgcttatataagcagcgtaatttagcggttgagcgtctgaatgccatcaaaggcatcagctgcaccatgccccaaggtgcattttattgctttgctaagattgaccgtgatatctaccctatcgataatgatatgaaatttatgatggatctactcattgaagagaaagtattgataatccaaggtacaggatttaactgggatcagcccgatcatttccgagtcgtatttttaccaaatcttattgatttagaagatgccatggacagattggatcgtttttttgccaaaaagcgtcgagaatttggaacaaat

SEQ ID NO: 129 - DNA, 3234 bp, Moraxella catarrhalis
atgccaaagcgtaccgacattaaatccattcttatcattggggcaggtcccattgtcatcgggcaagcctgtgaatttgactattcaggcgcccaagcctgcaaagccttaaaagaagaaggctatcgggtgattttggtaaactcaaatcctgccaccatcatgactgacccgtccatggctgatgccacttatattgaaccgattacctggcagacggtagagcaaatcattgccaaagagcgtcctgatgccattttgccaaccatgggtggacaaacggcacttaactgtgcgcttgaccttgacaaacatggcgtgcttgccaaatatggctgtgagctgattggggcgaccaaagaagccattgaaaaagccgaagaccgtgaactgtttgataaagccatgaaaaaaatcggtctggaatgccccaaagcagaaattgcacagagcatggatgatgcttttgccattcaagctaaggttggttttccgtgcattatccgcccatcattcaccatggggggttctgggggtggcattgcttataaccgtgaggagtttattgagatttgtgagcgtgggtttgacttatcacccacccaccagctgctcattgatgagagtttaatcggttggaaagagtatgaaatggaggtggtgcgtgataaaaaagacaactgcatcatcgtctgttccattgaaaactttgaccccatgggtgtacatacaggcgattccatcaccgtcgcccctgcccaaaccttaaccgacaaagaataccaaatcatgcgtaatgcgtccatcgctgtgttgcgtgagattggtgtggagacaggtggttcaaatgtccaattcggcatcaatccaaaaacagggcgtatggtggtgattgagatgaacccacgagtcagccgttcatcagcattggcatctaaggcgacaggctttcccattgccaaaatcgctgccaaacttgccgtcggctataccctagatgagctaaaaaatgacatcacagggggcaaaactccagcgagttttgagcctgccattgactatgtggttaccaaaatgccacgctttaactttgaaaaattcccccaagctgagagcgtgctaaccactcaaatgaaatcggttggcgaggtgatggcaatcgggcgtaattttcaagaatccatgcaaaaggcactgcgtggtctggaaataggggtggcaggatttgatgagcaattagactttgaacaaaatgatgacagcatcatcagcaccttaaaactcaaactcaaaacccccaccccagaacgcattttttatatcgctgatgcactgcgttttggcttatcggttgatgatgtttttgctgacaccaacattgacccatggtttttggtgcagattgaggacattgttcatacagaaaatcagctaaaaacccttggcatgggcgacttaacccccaatttgctacgccgtcttaaacgaaaaggactctctgatgcacgcattgccaaattgatgggcgtgtctgaaaaacaatttcgcaaaacccgttggaacatgggcatttatcctgtgtataaacgggtggatacttgtgccgctgaatttgaaacatcaaccgcttatatgtactcaacatatgatgaagagtgcgaggccaacccatcaaataaagacaaaatcatggtcatcggtggcggcccgaaccgtatcggacaaggcattgagtttgattactgctgcgtccacgccgcccttgccatgcgtgaagatggctatgaaaccatcatggtgaactgtaaccctgagaccgtttcaaccgactatgacacatcagaccgtttgtattttgagccaatcaccctagaagatgtgcttgaaatcgtacgcaccgaacagcccaagggtgtgattgtgcaatatggcggacaaacgccactaaaacttgcccgtagcctagaacaagcaggcgttcccatcattggcacaagtcctgatgccattgaccgagccgaagaccgtgaacgctttttgcagatgattaacaagctaaacctaagacagcccaataacagcattgtcaaatcatcagaagaaggcattcgtgaggcggcgaaagtgggctaccccttagttgtacgcccatcatatgttttgggtggtcgtgccatggaaattgtctataacgaagatgaacttaaacgctacttgcgtgatgcggtgcaagcgtctcatgaagcgcctgtcctgcttgaccatttcttagatgatgccattgaggtggatgtggattgcgtatcggacggcaaagaggtggtgattggtggcatcatgcagcacattgaacaagcaggcgtgcactcgggcgattctgcttgctccattccgccttactcattaagtgatgacattcaagatgacatgcgtcgccaaaccgtcgccatggcaaaagagcttggtgtggtcggcttgatgaatgtacaatttgccatcaaaggtgaaacagtctatgtcttagaagtcaatccaagagcgtctcgtaccgtgccatttgtctccaaatgtatcggcgtgtctttggcaaaagtcgccgctcgctgcatggcaggacaaactttggcagagcaaaacttcacccaagagattgtaccaagtcattattcagtcaaagaagcggtgtttccttttgccaaatttccaggcgttgaccccattttgggccctgagatgaaatccacaggcgaggtgatgggtgtggggcagacctttggtgaggcgtattataaggcaacactgggcagtggtgatagattgacagggctgccacaagagggggagaccaaaacggtctttatctcggtgcgtgatagcgacaaagcgggcgtggtagatgtggcaaaacgcttggcaggctttggttttaacatcgttgccacaggcggtacacatgatatgctggtaggtgctggcgtagcgtgtaagcgtgttaataaagtcagtgaaggtcgccctcacatcgtggatatgatgaaaaatggccaaattcatcttgccattaataccacagagggcaagcaggcgttaaaagactcgttcccaattcgccgtgaagccttgcaaaataaaatactggttgcaaatacactcaacgcagggcgtgcggtgtgtgaagcctatgagacgactttgccgtttaatgtttataagctgcaagatttgcatgcaaaa

SEQ ID NO: 130 - DNA, 966 bp, Moraxella catarrhalis
atgactgtgacgatagcaatcaattcacaaaatcaaaaacccatcaagcgattgggcttgatttttggtgtgatcaccacttgcattttggcaggatgtgccagtaagccaacctataatagtacctcaggttcgggcagtcatcgtacttcaggttcaggtggtttggcaataggttcacaggttatcacggacagtcagggcgtaccaaatcgctatcaggtgaagcagggcgatactgtcagtaagattgctcagcgttatggattaaattggcgtgagattggacacattaataatctaaatagcagttatacgatttatacaggtcaatggctgactttatggtcaggtgatctcaaggtgcgtgagcgtagtatcagctctggtgtgaatacagctcacacaccttcgcctgtggcggttcagtcaagcagaccaccagtacagcagcatcctgccgtacaaaaacccacgccacctgttgttgtggtaaaaaaacccacaccgattccgcctgtggttcagcagccagcaccagttgccccaccagtgacagaagcaccatttgctacgggtagctcaggggtgatgcaatttcgctatcccgttggtgcgaccaatccagtggttcgacgctttggtacggcgacagtggccggctcaactgttaccagtaatggcatgtggttttctggacgagatggcgatttaattaacgccagtaatgcaggcacagtcattcaagctgatcacaatatggacggggcgagtattgtgattcagcataccaatggatttgtttcaagctatatccatattaaggacgctcaagttaaaacaggcgatacggtgcgtaccggtcagcgtattgcaagcatgaaaaatcagccaagcggtgcggcactatttgaatttagaatttctagaaatggcgtgtatgttgatccattgacagtacttaaa

SEQ ID NO: 131 - DNA, 1302 bp, Moraxella catarrhalis
atgcaaggtaaatttatcatcaaaactttaaccgctgctgtcatcagctgcacaagccttgtgtcacaagcatcaatcagcggaaatagtcatgacggtattgtcgctgttgtcaatgatgaaattattttaaaaagtgagctcaatcaagccactgagctggtcgcaactgaaatccaaaaaaacggcggcaatgtcactcaagatcaagcacaaacgctggctttagatgagctaatcaatgaaaaacttcagcttgccatcattaatcgtgctggtgtcattccaaatgatgaggtgattgatcagcagttattacaaattgcccaatcccaaggcgtgaatagtttatcagagtttcaatccaaacttgatgccgagcgtgcaggcagttatgttgcgttgcgtgcaaacttaattcaagatgccgccatacaagcattatggcaaaatcagattcaaagccgtgtacgtattaccgacgatcagattgatgcttttttaagcagtcctgaatcagcacgcttaaatcaagttcagtaccgccttttacatattcgtgtgccttatcttgataatactgccagcgagcaaaaccgccagcaggccgccttagttgctgagcgtgttaaatcttctttagatgctggcatgaatttggatcaagccatgcaaaatgctcgtggtgattatacgcccgatcttcaaggtgctgatactgggctgattaatgccaccgctctaccgccagccattgctgccaaagtagataagctcactattggacaaacatcaacgccgatcgttaccgtaaatggtattgatatcgtcaaagtggttaataagcaacaacaaaatcaagtcatcgtacctaaatggcaaaccagccatattttggctcgtattgatagcaatcaaagcagtgatatcgctgaacaaaaaatcaatgccatttatcaacaattacaacaaggtgccgattttgggaccttggcggcaacttattcagatgacacaggttcagcttcacaacatggcagtttaggctgggttaatgaaggcgatatggtgccagaatttgaaaccatgatgaaaaatacagcaaaaggtgatttttcaacaccatttcgctctcaatttggttggcatatcctaaaagtcaacgatattaaacaacatgatattaccgagcaatatcgacgcaacgctgcacacgaatatctattcttgcgcagcgcaccacaggctcaagaagattggttgcaagaattacgctcaagtgcttatattaaaatttatgaa

SEQ ID NO: 132 - DNA, 2811 bp, Moraxella catarrhalis
gtgattcgctctcgtattctttgtgcaagtttaatgcacaccgctcatcaccatcgctcaaagacatatttgactaccgctattcgttacgcactatttggtatcgccagtttgccatttgtcataccaacttatgcagaactcaataccagccgttcactgacagtcgttggtgctgacagctcaaaaaatttgcctgatacaccaaataccaaacccaatactgtcttagccttagacgcccatctacaaagtcatgatgatactgccaatgcctttgatggctttgattttgaagttatcacacagcaggcagccgagcagacaagcagtcaagcaaatcaaggcaatcatcagatgagccagcttgacgcctttgctagtaagtcagacaatccaagtttaaacactgccaggctgacggataagcatgatacaccctctgccagtaaaagcttagccaaattagccgaaaactaccatattaagtccgatccagacgctcatcgttgtcagggtatgtggatgcagccaatccaccaagcaacacacacaaaccgccctaccaccccaaaactggatgaaaatggtaatccgattacagaagatggtatttttgctcaagctgattatggatattatgacgctcaaacttatgccgaactgtctggcaatgtcattatggaacaaaacggtcggcgtgtaaccgctgataagcttactttagacacccaaacagggcaagccactgcgtcaggtcaagtacaatttagtgatggcggtgcaagtgatcacagtgctggcattattggcatggctgaaaacttagtataccatacagatggtcagacagcgaccgcacaagatgttgcttttgcaagcactaccatcaatgctcacggttatgccagtcaaatggataaaataagcagtagcgaatatcggcttcaacatgtcatgttcaccacctgtccacccacagaacgcaaatggtacttagatactgatagcattgatatcaataccgatacaggtcgtgctatcgccaaaaataccaccttgcgtatcaaaaaagtacctgtcttttacctgccctattttaactttccgatcgatgctcgtcgctcttctggatttttattaccatcaatgggatttggtgcatcggacagttttgaaattagtacgccttattatctgaatttggcaccaaattatgatgcaaccattacgccaactgtatttactaaccgcaatcctatgctgactggcgaatttcgttatctgacccaagattatggatcaggggtgttgactgcttcgtaccttccaaaagatcagcaatatcatgataaagaccgtagccgaatacaatttgatcatacatggcaacccaagcagtttgataaaattaccacttacgcacaatatcaatctgtttctgatgccaattatttatcagactttaatgccttgggtgttgagagtgctaagctaaatctaccaagacgcatcggcacaagcttcttggatgaaaatgtctcagctgatttaagatttgaagattttcagcgtttagacggttttggcttagatggtcggccaattacagacaaagatagaccatatgcacgcctaccacagctatcggtcaactatcgtttgcctcgcatatggatgggtacacccagcggtcttgaactgggtggtattcataattctgcctatttcaaaaaatccattaaagataactctgaaccagaaaaaagcggtggtagaatatttaaccaattcacagccagttatccactgcttcgctcttggggttatttgacgccaaaacttagcctgacacatctatataccagctatgacgaagacagcttagccgaccaaaatatcgctaagaaaaatggtcgccattcggtatttgcaccgacggtcagcttggatgctgggctattttttgaaaaagcgggtgcaccatttggcatgcatcaagatacaggtggctatcaagtactgacaccaagattacactatacttacacgccttttaaagatcaacacaatgtaccaaattttgagacaaaaattgcacagcttagctatgagcagcttttgaacaataactggtttttgggtcatgatcgcattcaagatttacacgccgtcacgcctgcagtcagctaccgttatatagataaaatgggcaggacacgctttgaaggcgggatcgcagaacagattttattgagtcatatccgtgttggtatcaatgacagcgaaagctatagcagcagaagctctggtttggcatggcaagccagcctacagccaaaagataatttatggtttgatgcatcaggttcatttagaacaaattatgatttgagcagtattgtggcacaaattcgctatcgtccaagtgatcgtaagttatttaacctaggtattgtcaaaagaaaagaaaatcgtgcttttaatcaatcagcattatcagcatatactgcctccgccatttttccaatcaataatcgctggcgtatgatgggtcaactacaatacgactacaacttagattatgtcatggattctttgatggggctaaattatgaagattgctgttatggtttgtcaatctatgcaagacgctatcgtgatgctttcaatccacatttatcacctgatactgcagtaatggcagaagttcgcctaaacggtatcggtggcggcggtcgtttgaatcgacttttgagcgaaaaggtactaggctatgatcaggttcaaaatgcttggagacatgattac

SEQ ID NO: 133 - DNA, 1038 bp, Moraxella catarrhalis
atgagcgatgtacgccacactcagatgatggaatttttaaatgcaaatttggcgaccgactttcgtgtagaaagcttatcgggagatgccagttttcgtcgttaccaccgcatttatttacccatgcgtggcgaggtgggcggtcatgagatgacatatcttttgatggatgcaccacctgataaagaaagtattcaagattttatccatgtggcaggtatcatgagcgaaacggtaaatgtacctgatattatggcgtgtgatgaagcgatgggatttttgcttttacaggattttggtacggtggagtttgcccatgccattgccaaagacactgataacaaagatggctattacaccaaggcgttacagacattggctcagctacagacgattaagggagctgatttgcctaagtatagtaatgaaaaattagcccaagaaatggacttatttagcgagtggtttttaccttatttgggaattgggctaactcagaaagatgctcaaaaatgggaaagtttaaaacaaacactcatcatgcagattaataagcagcctcaagtgattgtacatcgtgattaccacagtcgtaatttgatgatggataagggcagtgatcatcttggtgtgattgattttcaagatgcggtgattggtgcgtatacttatgatttggtcagtctggtgcgagatgcatatattgattataatgaggtgtgggcccaaaagcgtattcatgaattttatcaattgattaaacccagcgttgatttgggaacttttatttcacaaaccaatataatgggcatacagcgtcatttgaaagttttggggatttttattcgcttgtcagagcgtgatggcaagcaccgctatcttaaaaacatccccaaggtaatgagcgacttggtggctgagctgtcttggctgtctgagcgtagtcatgatgcgatttatggtgaatttatggcatggcttaaaaatagcgtactacctgcttatagcaccaaatttgggtacttatcggagcggtta

SEQ ID NO: 134 - DNA, 1626 bp, Moraxella catarrhalis
atgactcatcattttcgctctttgtttgtcatcagtatacatactgtcatgctggtattacttgttggctgcaaaaatttgcccgatacgcctcacttaccaaagagtctggcattgaccaaacaggttcaagagcgtcaccaaatggtcaaacatggtggcagttcagatggtctcatctcagccatcaacgcccaaagccatcatcaccccaatcaatctggatattatccgattacaacaggtgccaatgcgtttgctgcacgcagtacgctgactgatgtggcaaaccaatccattgatattcaatactacatttggcataacgatgaagctggtcaactgatgcttaaagacctgtgggaagcggctgatcgtggtgtgattgttcgattgctgcttgatgattttaatagctcacctgaacttgatcagctcctactacgtatctcaaagcataaaaatattgctgtcagattaatcaatcccatgccttatcgtggcttccgtagtctaaactatatgttacatcccatacgcaccaatcggcgtatgcataataaaagcatgacatttgataataaaatcagtgtcataggtggtcgtaatatcggtaatgaatatttaaataatgcacctgttaatcattttgctgatttggatgtcatgttagttggtcatgtcgttggcaaaattacccaaagctttgagatttattgggcttcacccctatcctttgatattgaaacacttgtcaaacatgacaacaaagatgacatcagtggcatcaaacctgtggtatttgatgaacttgaaaaagtcaaagacagctcagatgctgatcgtgagctacgcacttatcgccaagccatgcaaaattcaaccattgggcaagatttactcgcccagcaagtaccatttttttggacagagattgatttgatagcagataatgttatcaaattaaacggtcactcagatcctaatgaatttttggtttcacagctacaaacacaattgggtcaaccaagcaaaaaactcagcatcatctcttcttattttgttcctaccaaagaaggtatcgacacactgatcacgcttgctaaaatgggtgttgaggtgcgtattttgaccaattcatttgatgccaccgatgttggtattgtacatgcaggttacgcacactggcgaaagcaactactggcggcaggcgtgcatctttttgagattaaatctagtgctcagagtatccaagataacgaaaatcgtttttggcgtacacgccagcacagcaccacaagtctacacgccaaagcctttgcggtagatgatgatcaaatatttattggttcatataatgtcgacccacgctcagccaatatcaataccgagcttggtgttcttatcaaagatagtaaattggcaggacagctacacaaagctttgagtaatagccaagccatcacccatcaagcctatgaactaaaacttgacgccaaaggtaatattaattggcataccatcgaaaatggtcaaccagtcattttgcatcacgaaccacacatgaatcataaagatcgtattatcatttggctggctggactgatgcctatcgattggctactt

SEQ ID NO: 135 - DNA, 1782 bp, Moraxella catarrhalis
atgatcaaagtgttgatatcgcctttgacgatacccatcatttgggggtttatgatgaaatcaaataaaccatttaagcttcgtgaactcatcagtacccaagtttgggtatggatcttggcttggcttctagggcttgtgactgtttggtcagtcttaggattatcgatggtgtcagggtggtttgtgaccatgtcagcagtggcaggcctagttgcggtaggtactcatacatttaattatatgatgccagcggccattatacgcacctttgccattgcacgcacgctatctcgctatggtgacttgatggtatcgcatcatgctgtctttgggctgttaaaagatttgcgtgtacgattttttgccgattgggcaagtttggattttaatgcccgaaacctgcaaagacagtctagcagccaaaaaatgcatcgccttgtcaaagacattgatgttttagatgaatttgttttacgcttgatatcaccttggattatggcaatcggtgcggtgattttggtggctggtgttacgctgttgctattacccaaagcatggtttgggctagtgccgatcggcttggcgattttgattgctgcttttgtggtatatcgtggcattcatttggcgtatgacgagagtactatacttgaaactcgcaaatcaaaactactggataccttgccagcactgacatccttgctgatttggcatcgctgggatgcgtacatacatcagctgagtgatttggatgctcagcaaaccaaaataacactgtcatcacatcgtttacgcagaatgggcatgttgggggtgcaagtggcactggcactggcggcgacacttatgctttggggtgtagggagattttttagacagacagatagtgttgcttttaccattgagacattaaatgattatccgatgatgagttcggcggtcgcactggcagtatttttaggattgatgggcttgggtgagtttatccaaaacttgattgctgagccattggctttggggcgtagtcaggtagccaagcagcgcctcaacgagatgcttgtcggccaaaacgctgctcccaaaatcaattttaatcagattaccaatcagcaggatgctttgactttatggcttaataatgccattgttagggcgccaaatgccatcatcagtgctcatattcaccatgccaagattcgctctgataagccttgcttgattataggtccttcaggtgctggtaaatccactttactgcatacacttgcccaagagcatgatttgacctcgggtgagatttggttatgtaccgacaccaaaaaatatccgtggcagtcagttgattttgaccaatcactgggatttttggggcaaacagttgatatttttgatcaaacgctggcagataatcttcgtttgggtaaaccaaacgcaactgatgatgagcttataacagctcttaaaaaagtaaatttattaacttggctaaataatcaaccaaaaggtctggcaactcggctcggagaatatggtatggctgtgtctggtgggcaagcacggcgtatcgccttggctcgactgttgctatccccaaaagcggtcatgatgctagatgagccttttgcaggcttggatccagatacacgccacaatgtatggttgagtctaattgatgcccaaaaatctggtgatattggcttgttattaatttgcacccaccagctgtggcaacagatgggtgaggttcaggtcatcaaaatcgagggtgagggtcaagtt

SEQ ID NO: 136 - DNA, 1311 bp, Moraxella catarrhalis
atgactttatcatcctatttaaaaattaatgagcgtggctcatccgtgcgtcaagaaatcattgctggcttgacgacttttttggcgatggtgtattcgatcatcgttgtgccaaatatgttatcagcagctggatttcctgctgaatccgtttttgttgcaacatgcttggtggcaggccttggttcaatattaattggactttgggcaaatgtaccgatggcgattggctgtgcgatttctttgacggcattcaccgcttttagcttagtgcttgggcaaggtgtgagcattcctgtggcactgggtgcaatttttttaatgggcgtggtttttaccttaatctcggtgactggtgttcgtgcgtggattttacgcaatttgcctgcatcgattgcacacggtgcaggcatcggcatcggactgtttttactgctgattgctgccaatggtgtgggtttagtcatcaaaaatgatacaggtttacctgtgacaatgggcgagtttatgtcgttgcctgtgattttatctttagtggggctggcggcgattattggtcttgagcgattacgcattaagggcagtatcttatgggtgattattaccattacgatgattgggctactttttgatcctgcagtgaagtcagatggtgccattttaaaagtaccaagctttggttcagactctttatttatgcaaatggatgtcatgggtgcgctaaatacagcgattttaccggtggtgtttgccttagttatgacagcaatttttgatgcaacaggtaccattcgtgccgtggcaggtcaggcaaatctactggacaaagatggtcaaatcatcaatggcggtcgtgctttgacatcagattcagtcagtagcctgttttcgggtatttttgggacagcacctgctgcggtgtatatcgaatctgctgccggtacggcagtaggcggtaagacaggcttgacagcgattgtggttggcgtgctatttttattgatgctattttttcagccattggcatttttggtaccaagctatgctaccgcacctgcactcatgtatgtcggtcttttgatgctaagcaatgtctcaagacttgattttgaagattttgtcggagcaatgagcggtttaatttgtgctgtatttattgttttgactgccaatattgtcacaggaattatgcttggttttggtacattggtgcttggacgactaatttctggtgaatttaacaagcttaatcttggtaccgtgattattgctgtcgtgcttgtcgcattttatgcattgggctatgccatt

SEQ ID NO: 137 - DNA, 696 bp, Moraxella catarrhalis
atgaaaaccaaagcaatcttaatcggtggttcgagtcgagtgggcgaggcactggcacaagagcttgcactgatctatgagtcggtgatactcatcacgcgtactcagccgcgtgccatgagtgcaaatatgcaggtgtatcatgtggcggattttcgagcacttgcatcgaccattgagacggtggcgattggtgctgatacagatgcttttagttgtcttggtgtctcaaaacagcaagtaccaagtcatgatgaattttatcaagtcaatgtcctgtataatttagaatttgccaaagcgtgcaaacaaaagggcgtgcaacagttttattttttatccaaagaaggtgctgatacccccaatcatgatgatgagctaactgccaaggcagatgtagaatatgatttacgcacgctcagctttgatacattggcaatttttcgtttgtatcgcttaaccttacccaagcaccgcctgagcctaaaaagcctcggcagccaagcactcaatggtgtattatctacactcaataaaaacaaacgcgcgcttgagccaaaacaggtcgccgcttgtatggcgattaccgcctataagcataaccatcagccgcagctacgcacaccaaaccaagccacgatcatcacacatgaacagatgctcaacagcgtcattcgccccaataaaaaatccaaa

SEQ ID NO: 138 - DNA, 663 bp, Moraxella catarrhalis
gtgcgtttaccaaaaccattttcgcaagcacacaagatctcaccttgtttgggtgcaaccaccaaagacaccactcggctcaccgcaaaatcatcgccgacttcatcgccatcttcatccaacagctcttcttcatcagttgtcgcaagcagattcacacgcataccacgaacgcctttggcaactcggctcatggcacggatactctgttctttaaagcgaatggctttaccttcattactaaatagcataatctcttgttcgccatcggtgatcgcaacaccaattaaggtatcaccttctgctagatcaatcgctcgtaagcctccagcacgcagattggcaaattgtgataaagccacacgcttgactgtccctgatgctgttgcaaagaacacaaagctattttcgtcttttaggtcattgacaggcaaaattgctgtgaccaactcatctgactcaagattaatcaaatttaccaaagggcggccttttgagccacgactggcaatcggaatttcaaacccacgcaatctaaagacacgacctgtattggtaaagcataaaatatgggcatgcgtactggttaccaacaaatgctcaataacatcatcttctttcatggcagtcgctgagcgtcctttacccccacgcttttgggcc

SEQ ID NO: 139 - DNA, 1419 bp, Moraxella catarrhalis
atgatcagcgtttttgaactgtttaaaatcggcatcggaccatcaagttcgcatacggtcggccccatggtggcggccaatcgttttttggtgttgcttggcgatcgtatggatagcgtccgtcaaattaccattgagttatatggctctttatcatcaacgggcaaaggtcatgccacagataccgctattttgcttggtttatcagggcatgagccacctacgattgataccactcgaaccgaagaatatttaaagcccatctaccaagaaggtcggttgatgttgggcggcacgcatcagattgcatttgatgctaacgaacatcttttatgggatgacacgccattacctgagcatcccaatggcatgaaactcatcgccatacttgatgatggtgaacagttggcacagacttattattctgttggcggtggctttatcaaagatgagcagcaaattcacttagcgccatctcaagatactcaatcagcctacccttatgattttgacagtgcagaagagctggcggcattatgccaagcacatgatttaagcattgccgatttgatgcttgccaatgaaactgccctaagagatattgatgatgttaaagcgtatttaaacgatgtttgggataccatgcaagcttgcgtcactcaaggctgtaaagttgatgggattttgcccggtggcttaaatgtcaaacgccgtgccaaagatctgtatgagcaactatccaaagaatatgggtattcaggcaatggaggtctgcttgccatggattgggtgaatttatatgccttggcggtcaatgaagaaaatgccgctggcggaaaggtcgttacagcacctaccaatggtgcggcgggcatcattcctgctgtattacattattaccgtggatttattccagcatttagctatcaaggggtgcgtgaatttttattggttgcaggtgcgatcggtgcactcattaaacaaaatgcctcaatttcaggggcagaagttggctgtcaaggtgaggttggctctgcttgtgccatggcagcggcaggattggctcatgttttaggcggcagtgttgctcaatgcttgaatgcagcagaaattggacttgagcataatttgggcttgacatgcgatccaattgcaggactggttcaagtcccttgtatcgaacgaaacgccatggcatcggtcaaagccattaatgctgcgcgtcttgcactacgaggtgatggcagtcatcatgtctcattagataaagcgattgccacaatgaaagaaactggcatggatatgatggataaatacaaagaaaccgccaaaggtggactggctatccacgctaccaatgccatgaagacagcacagcgtattgatgccattaatattagctcaggatttagtcaatgc

SEQ ID NO: 140 - DNA, 1149 bp, Moraxella catarrhalis
atgaatacgatgcgtagcacctctatcaccatccaccctaatgctttgacacacaatctgcaaatcatcaaaagccagcttgaccgaacgaccaaagtactcgccatggtcaaagcagatgcatacggtcatggcatagatgcaaccattcctgctttgatccatgccgatggctttggtgtggcgtgtttgtctgaagccatggcggtcaagcaagtacttgatggcatgaatgttaaaaagcccatcgtactgattgaaggtgcgttcagcttagatgagtggaaagtggcaattgaccatgattttggctgtctgattcatcatgaaaatcagctcacttgggcattgtctcatcggcccaagcaagaccaattttgccataccatttggctaaaatacaatacgggcatgagccgcctaggatttaatgacgatcacatcatcacggccgccaaatcgttggccgatgcaggctatcggctaattttgacaagtcattttgcatgtgcagatgacaaatcacacccactaaatgcacaacaaatcagcaaatttgatcaagccttggcgtgtattcgatcgtttgcacctgatacgcttgccagtttgtgtaattcagcagggatttttaattttaagcaccagcatcatgattgggtgcgtgctggtattgccttgtacggctctaagcccatcaccgatcaatcagccaaagcactcaatctcatgcctgccatgacgctatcggcacaagtgatggcaattcacaccttggcagctggcgacagtatcggttatagtgcactgtgggcagcacaaaaaccacatcaaattgctgttgtcagtattggctatggcgatggttatcccagagtggtgatgggtgctaaagtcagcgtgaccgatacttcgggcaatcgccacttatgcgatatcattggtagagttgccatggatatgtttatgattgatattgatgggcttgatatcgccattaatacgcctgttgtgctgtggggcgattcgcccacgatagatgaggtggcaatgtgtgcagggacaattggctatgagctgatgtgccgtttgaccactcgaccaaagcgatgtattatggatacatacctacctaagaaggaatttaaa

SEQ ID NO: 141 - DNA, 1392 bp, Moraxella catarrhalis
atgaattcagatacattattaaccatgcgacccatcaaagcggttgctattgcaggtgttctggttgcactacttggtctgacgatgattgcttggagctgggtaccgcatttgtctttattggttgtgattgcagcactgttattttttggtttattaaataaactcaaatttgagcaaatgcaagcatgcatgattggcagtgtgggatcggcaatgggtgcgatttatttattttctttcatcggtcttttggtttctgctttgatgatgtcaggggcaatcccaacattgatttattatggatttgagatattatcagccaaggtattttatctgtcggcatttattttatcatcggttgtgggcatcgccttaggcagtggatttaccacttgtgcaaccgtgggcgttgcatttttgggtatggcaaccgcttttggagcaaatcctgccattgtggctggtgctgtcatctctggtgcgttatttggtgataagatgtcacctttatcagatacaacgagtatcgccgcctcacttgttggcgttgatttattcgaccacattaaaaatatgatgtatactaccgtgcctgcttgggtcatcacggccataattttttggtatttatcagccaccaataccatcagcgaccttgcaggcattgccatactcaaagagcaactttttagcagtggcttagtgcatggtttttcattaataccttttgctgttcttgtcattttggccattttacgagtcaatgctatctataccattattgcaaccatcataacagcactgatgattacctacacacattcaagcccaagtttgaccgatttgggtggatggttttttgctggatatacgccagcggaagagctggcattgggtgatgtggcaaaaatggtatcacggggcggcttacaaagtatgttttttagtcaactgttggttattttggcattgtctttgggtgggcttttgcaaggattgggtatcttgccagcattattagatggcatgcgtcatttattaacccatgccagtcgtggcgtggcagccgcagcatttacctcacttggcattaatgttttggtgggtgaacaatatctgagtttattattatcaggcaatgcctttttaccagaatatcagcgattgggtttgcatccaattaatctatcacgcaccattgaagatgcaggcacggtgattaatcctttagtgccatggggtgtctatggtgggtttttggctgggacttttgggatgccagtgattgagtatgtgccgtatgcgtttttttgttattggtgctttttattgacactgttttttgggataacaggattgaccattacacgcttatcacccaagttgaca

SEQ ID NO: 142 - DNA, 1158 bp, Moraxella catarrhalis
atgaaattcatcaagcaaaatagccatcatttggcaatgttacttgcgatgaccactggtgctcatcaagcacacgcattttcggttgataacagtcagcagcgtataacagtacagcccacttatgtgcaacctgctcaggtaatcacctctcaatctgtgtatgttgaaccgacagcccaagtaaccacaacgacaaatgtgagcgtgcaggcagtaccacaagcaccccaagagcatgtggtgtcacaagaaggctatgcacaaacccaactgaatattcaaccacaagtcatctcaagcaccaaaacccaaacaaccgcttacaccaccacctcaaacgcccaaacagccatcttaaatgaccaaaacagctatacaaatagtttttatgcgttgcccatcagtacacgatcggcagcggttttggtctatgatttacaagatggcaagctcatttatggtaagaatgcagatgttcaacgctcaatagcttctatcagtaaagtcatgaccgccatggtcattttggatgctgagcttgatatgcgtgaagaaattactttgattgcctctgacttgattggtgcaaaacaagcaagcacacgcctaaaagctggtgaccgcatgacacgatctgagtttactttgatgatgctcatgcgttctgaaaaccctgctgccaaagcattggcacgcacttaccccggtggatatgatgcttttattgttgcaatgaaccaaaaggcgtatgatttgggcatgtatcaaacgaaatttagtgattcttcaggtttagatccacgcaatatgtcatcagccaatgatttattaatcatgatgaaagcggtcaatagtagtccacgctatcacagtatccgtaatttttccacagcaccacattatgatttttatatcgccaattatggcagtggcgaccgtatctataaaggcaataataccaatcgcctagtacgagaaggtgcttacccaattggtgtccaaaaaacaggctatattcgtgaagctggttatagtgttgtgatggaaactaacattaacaatcgcccagccattgttgttttattgggtgcatcaaacagtgcaaaccgatggagcgatgctgaaaccattttaactgaattggcttatcgccag

SEQ ID NO: 143 - DNA, 2457 bp, Moraxella catarrhalis
atgaaaaaacacaccaaatcttcgatttcaacacaaattttaaagccgctcagtcttgccatttcatcttgtattttggttgcttgtagtagcacaggcacacctgctaaacctgttagccaaaccccaaaacccatacctcaagctaagcccagtcagcagattaatatctcgtcaggtaatactaatttgggtaatactaagactggtgcagatgtagatgttttggatgttcagatgcttgatgcattagaagcgttattacaagcgactgatatgagcatggtggagggtgatgaactggcgattcaacgctatggtaatttatgggatcgggttcgccgtggttatcgcattaatgagatgaccaatgcacgcattgaagctcaaaaatcatggttttatactcgccaaacctatttagatcgcttgactgcgcgtgcttctcgctacctacatcatacggtcgccgaagctgaacgccgtggcattccctctgaattggcacttttgccaatcattgaaagctcatatgacccaacagcgaccagtaatgccgccgccgctggtctttggcaatttattcctagcacaggtcgaatttatggcttgaaccaaagtgctacctatgatggtcgccgtgatgtcattgaatcaacgcgtgccgcttatgactttttaacaagtttgtataaccaatttggttcttgggagctggctttggcggcttataatgcagggcctgggcgagtttcgcgcgccatcaaagccaaccaagatcaaggattgccaacagattattggtcgcttaagctaccgactgaaaccatgaactatgtaccaagattcttagcagtcgctcaaattgtgaggtcgccaaatacttatggcatcaatttacccgccatcgctaaccacagtcattttagaacagtgccagtgaattatggtgtcagcctatctgaggttgccacagtgacaggtttgtcagtcagcgagcttcgtttattaaatcctgcactgttaaattttaccgtggatgagattggtccaaatcgtatcgtcattcctgacagtttgccgaaccaaatcgataatcagctggcttctttaaaaggctatggatttggtggcgattatatcgcaacagcacctgcccagagcatcacctatgtggtacctaagtctggtgctacagccaacaccagctctcaacaagaattaatcgcagccaatacactaccaaccaccatcgcacaagttacaccaaataataccattgtgcaagaaccagctttatcaaaatctgagataaatttgattgcagcagaaattcaaaaaaccagtcctgaagtgcctgcaattagccctcaagatggcaatattcagctaaatgcggtacaaactggtcagtcggttttggatgctcgtggtgagactaaaatgttgagttttgcagatgggccaaaaactcaagctgtagcacagcagcccactcagcctgtgcaagtagctgtaacaccgcctgctcagcctgtacaaataacagtggtcagtcctactcctgaaccaatctctcagcccaagcctcagcttccacctgtcacagcttcgataccagtcgtctcatcgccacctgtcttagtcccaccgccaccaagtcggcctcgtcctgaacctgcatcaagacccaagccaaaacctgaaagctacaccgtgcgtgctggtgatagcctaacatcggttgcggctactcatggattaacggtcggtcagcttgccagttataataatttggcgaatgatgcacatatcttgattggtcaaaggctatggcttgtcgctggtaaagtcaaacgccaaccagtatcagcccaacagacatcacaagccacccagtctactaaaaataatcaaagcactcaaagcaccgccacacatcgcgtccaatcaggtgaaagcctaactgctatcgctcgcagatataacatcagtttacacgccttagccaaagaaaatggcttaagtgtcacagatggtgtcttaattggtcaaacactcaaattgcccagcgatgccaaggctgaaagtagcacaccatctcgtttgggaaataccaaaaataattcgacacgcacgcctgccaatacaaatattggtatcactgaaaattataccgtcagatctggtgacagcctaaccatgctctccaatcgttttggcgtagcaatcggtgatttggcgacagcaaatggtttggcttccaatgccaatttgcgtattggtcaaactttaaaagtccccaagctaacgacgacatacaccgtcaaagcaggcgatgggcttatcgctttggcacgacgctatggtattagtacccaagagcttgccaaaatgaataacttagaacctactgccgatttgcgtattgggcaggttttgactgttccaaataaa

SEQ ID NO: 144 - DNA, 1416 bp, Moraxella catarrhalis
atggctaaagctaaatcaagctacatttgccaaaattgtggggcgatttatggaaaatgggcagggcaatgtacagactgcggtgagtggaatactcttgttgaggcacctaacaccagtttgccacatcatcataaatcaaaaactaccacagcacccagaaaaaccgctaactatgctggagcggtgagtgctgtgatgacattggaccatgttggcgttacgctagaaacacgcatgccaacgggaattggtgaatttgaccgagtgcttggcggtggacttgtggcaggctcggtggtgttaattgggggcgaccctggtattggcaaatccacaatcttactacaaactgccattaacatggcagcaggtgattcactatcgggttctgctttatatatcacaggcgaggaaagtctgtcgcaggttgccatgcgtgcagtgcgacttggactaccaaccgatcgcctgcgtgtcttagccgaaactaatgttgataccatttgtgcagcactcaccaccgaacagcctgccattgctgtcattgattcaattcaaacactctttaccgaagccatacagtccgcccccggaggggttgcccaaatccgtgaatccgccgccgtcttaacccgttatgccaaacagacaggcacggcactgtttttggtgggacatgttaccaaagaaggagcattggcagggcctcgtgtgctagaacacatggtggatacggtgctgtattttgagggtgaatcagacagtcgttttagaatgattcgtgccatcaaaaaccgttttggggcggtcaatgagttgggaatttttggcatgacggatacaggattaaaggaggttgccaacccctccgccatttttctaagccgctatgataagcccattgcagggtcggtggtgatggtcagccgtgaaggtacacgccccctacttgtggaggtgcaagccttggtggatgactctcagggtcaacccagacgcatggcacttgggcttgattatcagcgtctgtccatgctccttgcggttatgcaccgtcatggtggcattcacaccagtggtatggatgtgtatgtcaatgttgtaggcggtgttaaagttatggaaactggttcagatttggcggtgctgattgcttgtgcatctagcatcaaagaaaaaccactgcctgtcagactgtgtgtatttggtgaggtgggattgtctggcgagattcgccctgtgccaaatggtcaagaacgcctaaaagaggcaatgaagcatggttttacccatgccatcgtccctagagccaatgcacctgcagccaatcatccacaatttaaaaatattcaaatcattgcggttgataggcttgatgaagcgatttatcaagcttttgagattaatgcaggt

SEQ ID NO: 145 - DNA, 444 bp, Moraxella catarrhalis
atgactatgatgatgaaaaataaatggatgcgtggtttggcgattttggtgttgagcttaccgacagtgacttatgcaaaaactgctgcccccaaagcgtctgaagcacctgaagtatcgttaacccaagaagagcaaatggctatagatttttgtgatttttcagcgtatggtgtgatgcatattgctggcgatcatcaaggtggtgcaacaaaatctgaggcactaaccaaccatgataagcgtatggctgagctgaaggatctcatcgaccttgacccagagaccgccacgatgcttgataagtattggaaaggtgctattgatagaatattccaagaatcggttcaaaaaaccgacgccgaaaaacaagcgtttgtgatgggtgtgggcgagtcatctttttattcttgccttgatcaagtgcttaaaactcccaaaaac

SEQ ID NO: 146 - DNA, 3984 bp, Moraxella catarrhalis
atgggcggttttttattgggtgaatttatgtcaaatacataccgcttagacatacaggtgaatgccgacagtgctaataccgccttgggaaatctaaaagagcattttgataagattgaacaatcaagcggtaaggcaggcgttggtattgatggcttttcagacaaggcagacaaggcgtcaaaatccagtaaaaaagctggtgatgaagctaaaaaagcgtcaaatgctcaaaaaggcttggcagcatcatttaaagaagccacagccgtcgcagcggttggctttgctgctatctcaggcacggtggcactatcaatcggcaaagcaaatgaatttgaatcagctttggcaggtatctcaaaagtcgtggactttaaaagccctgacggactaaaagatatgcgtgcagagcttgaagcgcttagtacgcaaattcctttgacatttacagagcttgcacaaattacagcggcaggcggtcagcttggcgtcgctgaagaaaacttgattgcatttacaaaattaaccgctgacatggcaactgcttttgatatatctgctgagtcagcaggtgatagcatggctaaacttgctaatattttcagtaagccgattgaagagatgggcgaatttggcgatatgattaacactatatcaaataatatgcctgccaaagcttctgaaattgtcgaatcattaacacgaattggcggtacggctaaagcgtttggtttagctgaaaaagaagcggtcgcactaacaagtgcaatgatctcattgggtaaagcgcctgaagtagcaagtacagcgattaactcaatgctaacaactttatcgacacttgatgttgcagataaagatgtagcggcatcactaaaagccatggggctaaatgctcaagaatttggtaagacaatcagagaagatggctataaagctatcatgcaactgcttgaaggcattgagcaattaccaaaggatcagaaaattggcattgtgaccgatttatttggtaaaaactttggcgatgatattgtgcaattagcaggtgcacctgatgttttagagaaaattaatgaattgttagccgaacaacaaggctatatcggttcaatggctcaagaagcgaaaaatgtctcaagcacgagtgaagcacgcaatcagatgtttttaaactctctggaaaatgcaagcgccgctttgggcgaagtgtttaaacctgcgcttgatagcgtcagagatgcagtcattcctgtgcttaatgcattcgctgacttcacaaaagaaaatccgacctttgtcgctgctatcgtaggtatcgcaggcgcatttactggcgttttaacaatccttggtggcgtattagctgtattgccaattttggcatcaggttgggcgatattaaccgcaggcgcaacggttgctgttgcaccaatcttgggtgttgtcgctgctatcgctgctgtcgtcgctgtcggtgcactattgtatgataactgggacttaatcaaagccaaagggcaagagatttgggcagcagtcagtgactatgcaagccaagcttgggaaagcatacaacaagcttggcagggcattggtgaatggtttggcaggctttggggtaaagtcaaacagaccttttttaattggttatcacaaatgccaaaaccagtacaagagatggttgccaacattggtgaaatatttagcacgattggggaggtggtaggggcggtttgggatggcattgccaatattgctaaaagtgtgtggcatgcgataacagaatttgtctcttacgccattgataaaataaagcctatcatcaaatctgttttagagttttttaaaaacgcatgggacggcttggttagtattgctaaaaccgtttggcaggcggttgtcagtgttgttagccatgtttttgataaaatatctggcattatcagtacacaatttgaagccatgaaagcgatttttatggcaggtgttaccatttttgccagcatttttaatgcaggctttgagatggtgaaaaccatctttagcaccgcttttaaagtgataacagccgtattaactggcgatatgcaaggcgtaaaagacgccatcaaagatggttttcaaaaagccgttgatatcttaaaaaaattggttggtaacattgtagatgccttaaaaaaacttggcaaagatttactacaagttgggcgtgatgccatgcagggctttattaatggtatcagcgagaaaatagatgcagcggttagcaaagccaaagagatggcaagtagcgtaaaaaatgcggttacaggcttttttgacattcattcgccgtctcgtgtgatgaaacaagttggtggctggatatcagagggcttggcaattggtatcgcctataaagcaccgatagcagccaaagaagccaaaaaccttgctaaaagcgtaaaaaatgcccttgaaagcgaccttcaaaaaaccgcagaagagatatttttaaccaaacagcacattaaaggcaacccatacgcccagctaaccaaagacattgcctttggtaaatacggcaaacaagacaccagccgattacaaaagttggcacaagagcaaatcttacaaagcaatatcctaacgctcacccaacagctgcacgaagcccagcaaaatctcgccaatgttgggttgaccagcattgaaatcatgcaaagacaatatgatgaaaccgacaaatctgtgcgagcgtctttggatttgtttgagcaagtcaagaaaacaagtcaagagctaattgatgcaaccaatcgccatgaggcgacccaagagtttgaaagcacgctaaaagacatcaaaaaacagatggcaattatgggtagtcaagatccattggctgagtttttatatgacttacaaaacgctgagaaatatgcttattataccactgagcagttggcaactcttaaagatgagatgattaagctacaagccgccaaagacgccaaacaagcaagcgacggcattgaggaaagtctaaaagatattaacaaacagctggcattgctaggcagtaatcaccccttagatgactttttttatgagcttgaacagacagacaaatacgcccatgcgaccactgatgaaatcaatgagctaatagacgccatctttaagctacaaaatgccaaagatgctctaaatgctaaacaagcatttgatacgctaatgaaagatacagcactggcaaatgaaacgccagcgcaaaggctacagcgtgaatatgatgaaaaaatggcggtaattgataggtatgagcaaatgcacagcgataagcttgaaaatgccacaagcctaagacagcaaatcaccgagcgatatgagcaagccgaaaaagatgctaaagtcaaaaactatcaagagcatttaacagcatttgcagggtttttaaaaaacacagcaggtgagcagtccaaagcctaccgtgtcatgttcgctgcgtcaaaagcctatgcgttggcggatgtgggcgttaaaatgggtaaggcggttgctgatgcttgggcagacccatcagcggtgacaatttggcaaaaacttgccaatgtcgccaaagtgtctttggaacaggggcatgtgttaagcatgattaacgccattagccccaaagggtttgccacagggggctacacaggcaacatggggataaatcaggtggcaggggtagtacatggtcaagaatatgtactaaatgctaaagctacaaagcgtatcggcgttggcaatcttgaacggctaaaccgtggtgatggcattggtggtcatgtcaatcatattaatgtccatgtaaccgtaaactctgacggtagtaatgtccaagccgatacccaaatgggtaaaaccatgggcgaagccatggcaaaaatcgctcggcaagtcgtgatacaagagagcaaacaaaacggacatcttgacaggctataccgcaga

SEQ ID NO: 147 - DNA, 762 bp, Moraxella catarrhalis
gtgctggatagcacgcaaatggagacaaacatgcaattaaaaactgatgaaaacggtaatgtggttgtgcaagatggtaagcctgtttatatgtatgacgatgggcaagagattgcttttgacgccatgcaaaacatggcgaaaatctcacaactcaatgcagaagccaaacagcaccgagaagccaaagaaaaagcggaaaccttgcttaaggcttttgatggtctaaatgctgacgatgctaaaaaagcccttgaaacggttaaaaaccttgatgataagcgattgattgacgcaggcgaagttgagaaagtcaaagcggaagcgaaaaaggcttttgatgaacagcttgccgagaaagacgcacaaatcaataagattaaacaagaatataacaatgccgtgattggtggtgcatttgcccgctcaagttttatcaaagacaaaacgctgttgccgtctgacattgtccaaagttcatttggcagtcatttcacgatggaaaacggcaagattgtggctaatttggggggaaacccgatttactcacgcaagaacccaggcgagcttgcagattttgacgaagcactagaaaccatcatcagccaatacccacacaaagacagcattttgcgtggtagtggtgcaagtggtgcaggtgcgacacaagcaggcgtgggcaaaaatacacccaaatccttagccgattgcaaaaccgatgaggagcgtgttgcatggctaaatgaacaaaacaacggagaa

SEQ ID NO: 148 - DNA, 720 bp, Moraxella catarrhalis
atgacaccagagattcgattgaaaaatttaaccttagttcttgagaagattgaaaaagaaaaagggttaaactcattcgctaaaatcgctaaagaatatgatttgaatgcaagttacttatctcagttaatgaacggcaatcgtcaaatcggcgagcgttcagctcgatcgctagaaaaaaagctgaagttggaaaaatttagtttggataattgcccgctacaatccaatatcaatcctgattttgaatcaatcaccgaatgggacaatggcgccccactggatgatgatgaagctgagatccctttttataaagacattgcctttgcttgtgggcatggtgcagtcaatggtgatgcaccgcttgagggtcgtaagctgcgcatgggcagacgcaccttgagcaatctgggtgtgatgcccatcaatgcctatgctgtcactgcgtgcgatgacagtatgacgccctatgtacaagatggcgacaccatctatatcgataaaggacgaaaagaagtcaaagatgggcggatttttgcgattcgctttggggagctgtgcttatgtaagcgtctgtatcgactgcctgatggtggcgtgcgtatcgtcagtgataatgccgctgaatttcctgagcaggtcgccaccaagcagcagatcagcgatggtgagtttgaagtgattggctgggtgtggagtgtcagccgtcttgagcggtgg

SEQ ID NO: 149 - DNA, 1134 bp, Moraxella catarrhalis
atgacaaccaccccaaaacctaagacggcgacaacaagctcaacgactgccacaaccgttcccaaaaaaacaacatcgactcgtaccaaagtatcgaccgctacagaaaccaagccaaagccatcaaaagcggaagcgattatgacacaaacggtgggtcaattagaagagttacttgagcatgctacccctgaggagttggcagaatttggtgaagcgctcaaagaataccttcccacaactcatgtcatcagccaagttcgtaccgataaatcacgagatactcagctttcggataattggcgtgaaggcggttatccctacaaatatcgtttaagtcgtaaaaattacgaagcccaaaaatacaagctacaaattgaactgttaaaactccaacatcatatcaaaaccactggtcaaaaacttgtcattatctttgaagggcgtgatgctgcaggcaaaggtggcaccattaagcgatttatggagcatttaaatccccgtggtgctcgtgtggtcgctctagaaaagccaaccgaacaagagcgtggccagtggtattttcaacgctatgtgcagcatctgccaaccgctggtgaaatcgttttatttgaccgctcttggtacaatcgtgcggttgtagaacgagttatgggcttttgtacggatgaagaataccgtatttttatgcatcaagtgcctgaatttgaaaagcatttggtagaatctggcattcatttggtgaaattttggttttcggtcagtcgtgaagaacagcgtgtgcgttttgccagccgtgaaaatgacccgttaaaacagtggaaactatcgccagtggataaagcctcgctcaataaatgggacgattatacacttgccaaagaagctatgttctttaatactgacacggcagaagtgccttggattgtgattaaatctgactgtaaaaaacgcgcacgcttaaacgccatgcgttatgtactcaataaattaacctacgaaaataaagacatcgctcaaattggtaatatcgatcctttaatcgttggtcgtgcaggtgcattgtatgagatggatgaacgcacagacttgactgtcagcactcaattacccagaaaaaccacaacaaccaaa

SEQ ID NO: 150 - DNA, 1455 bp, Moraxella catarrhalis
gtgatgatgcctattgtgattggtaaaatgagattatttttggaagtatttatgaaaaatcagtctgccacccattgggcattatctgtcatgacaatcagtgtgcttttaagtgcctgtacttctcatgtggtgcatgagcgtgcaccaatcaaagttgtgcaggttacacccaatcctgcacaggttgcaccgcctgctcaagtgcctgctcaagctttgaccaaagtacctacctcaaccgttcagcctacgaccgccaaacctgcatccgttgtggtacaaaaatcggtcgtcgtacaaaaaccagcccccaccaacacacccagcatgaccagccaaagtcattatgctacctttactgaatggaaacatgattttattcatcgtgccttggcaaaaggtattaatgccaatagtttaaattcattgatgggtaatgccacgctcaatcagcgtgtgatagagttggatcgtagtcaagctgaattcaccaaaatgccctgggaatatgtcgaatcagccgcttcttcaaatcgcatcagccaaggcagatccaaattaaatgaaaatttgagcatattaacctcagctgaatctatctatggcacaccaaaagagattaccgccgccatttggggtatggagtcatcatacggtgctggcatgggtagtatggatttggtcagtgcgttatcaagcctagcgtatgatggtcgccgccgtgagtttgctgaaaaccagttacttgcgatgcttttaatgattgagcgtggtgatgtggcagcatctcagctaaaaggctcatgggcaggaggcatgggacatactcaatttatcccaacgacatggatacaagagagtatcgatggtgatgccaatggtcgaaaaaacccttggaatcgccaagatgccttaacttccactgcaagttatttggcaaatgctggctggattcgtggcttacagcctttttatgaagtgcgattaccaactgggtttgactttttacagctaaatagcaagcgtagccttgatgcgtggaaggcattagggctggtcagtgcaagcggtgaatattttggtggcgtacatgaagcacaattgtggctacctgctggtcaatatgggccagcattgctactcaccaaaaattttgaggtcattcgtgtttataacaattcctcaagctatgctttgggtgtttctttgcttgccaaaaaaattgccggtggtcatgatcttgttcaatcttggccacgtcatgaacagccattatcacgcacccaaatcatcaatttacaaaaaaacttaactgcacaaggctatgacacccaaggcattgacggtgtcgctggtagtaatacccgccaagcatttgcgcgctggcaagctgctaatggtcaaataccagatggattcatcagccagcgtacggctggtcatttggtctgg

SEQ ID NO: 151 - DNA, 1410 bp, Moraxella catarrhalis
atgaaactcatgccattggcttttgtgattggtgcggcggttggcttatctgcctgtcaaagtcttgaccatacccaaaacgctatctcaaccacaaaaaccccaagcacccaagcagaacatcacgatatttatacccaaaccttaaaaaatggtctaaaggtcatcatcaaacaagacagccgagcgcccattgtgatgacccaagtttggtatgatgtgggttcaagtgatgagcctattggaaaaggtggtatttcacattttttagaacacatgatgtttaaagatgccaaaggtgtcagtcatgacgactatcaacgcctcattagtcattttgggggtgagttaaatgcctttaccagtgatgaatttacggcctattatgaaagcctgcctgccaatcaatttccattggcactacaaatagaagccaatcgcatgaataacctcatcttaaccgctgaggaggttgccaccgaaaaacaggtaatcaaagaagaacgccgcctaaccacagacgacaaacccaccgccaaagctcatgaagagtttttggcaattgccctaccaaattctcccaaaggtctccccatcattggtagcatgccagagattgaagcaattacggtaacagacttgcaaaattggtatgatcaatggtacgcaccaaacaatgcaacattagtactggttggcgacatcgaccccaaaaccgccctgccttggatcgaaaaatattttggcactctaaaaccatcatcattaccaaaacgcaccccacttagccagccaagtcatcgtggctatacgcaggccaatagctatcaaaatgttaaagtaccaagcttaatcatggggtttaatgtacctactttaggtagtcgtactattaaaaatcataccaaagaagctcatgcattatcactgcttagcgatattgctgatggcggcttatcagcacgttttgagcgtcatctgattcgcaaattacaaatactaaatagcgtttctattcgctataatatgctctcaaaaagtgatgatttatttaccattattgccacacctcgtgagggtgtcagcttggcagatgctgaagctgccatattagcagagcttaatgccatcaccaacgatcaaatcacggatgatgaactggcccgtagtcgtgcaggcttgttatcatctttggtgtttgccaatgatagtatcgccaaacaagcctctaatttaggtgctttgtctgcgttggggttacctttagatactttagatactctaccaaaagcattggacaaagtcagtaaatcagacatccaagctgtgggtaaaaaatatctgaccaaagacaatctaaccacggtttatgtattgcccaaaaatacacaatcgccctcagacactcat

SEQ ID NO: 152 - DNA, 1464 bp, Moraxella catarrhalis
atggacactgacatgaaacatttaacaaaacatcgcctatcagctgccatcattggcgttttattattcattagcccatcagtgcaagcaaatacgacacaccatcacacgctaaccagtagcgagcttaaacttgctgatgatagtattattgatagtatcaatcaattgggtgagctgaccgtcaatattccaaatacacaatattttcaaaccaacaacggtgtgagcgttgcttttacgccattacatgagctgcctattgtcgatatcagcttgtattttaatgcagggtcagcgtatgaccatcaggttggcaaatcaggcacggctaacatggttgcaaccatgctcacccaaggaactgacagcctttctgaagatgagtttgttgctgccaaagagcgtcttggcattgattttaccagtacagcaaataaggataacttaactttatcattaagaagcttgtctgatcaatcattattaaatcaagccgccgatttaatggtcgatgctgtcactcaacctgcttttgatgataagactctacaacgcaacaaaaatcagctcatcaccagtttaaaacaaaaaaagcaaaacccttatcatgtagcttctgttgcttatcatcaagccgtatatgaaaatcatccttatgcacacgcaaccacaggcgatgaagatagtattgccaaaattgatcgtgatgagctgcttaatttttggcgtacttttattaatgcaaataatgcgacactggtgattacaggtgatatgaccgccgagcaagccaaatcacttgccaaccatctgaccgccaaattaccgacaggcaagtcgtataaaaatacgctggatttgacaaaaccagttaaggctcgccatatccatattcctcacaacagtagtcaaacccaaatcatcatcggtcaccccaccagtaaagtacgcacggacaaagcaggtcgtcaagagttcagcgatttttcattaggtaatgaaattttggcaggtggtgattttaatgccagattgatgaaaaccattcgagagcaaaaaggctacacttatggcatttatggcggtatggaacgcctcagagcaggtggtaattatgtggttgaattttcaaccgatggcgataaagcagccgatgccattttagagacgctacacattattaatgagtcgctgaatgaaggtgtaacccaagaagagcttgagttggtgcgtttgggtaataaaaatggttttgccaatattttttcaagcaatgccagtattcatcgtgtcattggtgctttatttgttgccgattatccaaaagatcatcttaaccatacgctcaatcgcttggataatgccacgataaatagtgttaataccgcactgaacttgcgtatcaagcctgatgaatttatcatcatcaccgtgggtaaaactaagccaaatttggacaaa

SEQ ID NO: 153 - DNA, 1017 bp, Moraxella catarrhalis
atgctattattatggcctgtttttttgatgaatgaaatggcaatgaaacaaaacaaccttgcacccagtgattacatccaagatgctattgacgcaatccgtaccgaacagcgtgctttggagttgttgattgatgagcttgatgagcgttttgtcaatgcatgtcaaacgattttaaactgttctggacgcgtggtcgtaacaggcatgggcaaatctggacatattggtcgtaagattgctgccacttttgcatcaacgggtacaccggccttttttatacaccctggagaggcagggcatggtgatttgggaatgctggtacaaggcgatgtactcattgccatctcaaattcgggcgaatcagatgagatacgcatgctgctgcctgtcgtcaaacaactcaacattccactaattagcatcagtcgtgataagcgtggaattttgccaagatcagcggacattgcactgactttgggtctgtccgaagaagcatgcccccttggacttgcaccaacttcaagcaccacagccacactggctttgggcgatgcgttggcggttgcactgttacacgcgcgtggatttaccagtcatgatttcgcactctctcatcctgcaggtgcgcttggacgcaggcttttgacgcgtgtatctgacatcatgcataccgatcatttacccgttgtacatcatcaatcaagcttgaatgaaactttattagtcatgaccagtggacgcttggggcttgctgtggtcgttgatgatgatggcaaagtggttggtatttttaccgatggggatttacgccgtaaattggctgagcataccaatctgacggttgaaattcagacactgatgaccaagacgccaaagtctgttgatcagcagatgcgtgcctctgatgcactgagtttgatgaatgaaaatgccatcagccagcttttggtacttaaagatcgtcaattgattggcgtaattagtattcatgatatactaaaagctggcatcagc

SEQ ID NO: 154 - DNA, 1671 bp, Moraxella catarrhalis
atgatggaaatcaaagcccccgatttgggtgttgaatcagctgaagttgctgaaattatggtaaaagttggcgatagcgtcagcgaaaatgacaatatgattttggttgagtctgataaagcctctgttgaagtgccatcaactggtgctggtgttatcaaagaaattcatatctcggtcggtgatcacatctccgaaggagatttgttgttcactcttgacagtgatcaaagtggtgatgctcaaaaaactgactcaaaatccgacgatgaacctcaaataaaacaatcagctaaagatgaagatgatatatctatcggtgatgatgagcaaacagacgatcagcctgacttaaatgaatcagctggtagtcaaacgcatcatttaccagaccttggcgtagatagtgccgaagttgctgatattatggtggcagttggtgatgaaattaccaaggatcaaccattgattttggttgagtctgacaaagcctcggttgaagtacctgcaccagttgatggcgtgatcgaagaaatcttaatcaaagcaggcgatagtgtctcaaatggtcaagcgtttattacgattaagagcaagggcatttcagccaaaaaatcatcaaataaagagcaaccagccgaaaaaaccaaagaagaagataccaaagctaaccaagcggcagtatctgaatcaaaaaacaagtctgtacaaagcccacaaaccaaactgccagaagctgtcgtaaacgaaaaagctcgacatgtttacgcaggcccagcggtgcgtaaacttgcgcgtgagcttggtgtcgacatcagtgctgtgacaggtacagcagctcacgggcgaatcttaaaagaagacttatttggctatgtcaaatcagtcatcagcggttctaccagtcaagcaaaatctggcacgaccgaggtgcgttctggtttgccaagcttaccagatatgagcaataaagagatttggggcgagcttgaaatccaagatctcactcgtctacaaaaagtctctattccgcagctaaactacaatacctatctaccacaggtgacgcagtttgatcttgctgatatcacagataccgaaagcttgcgtaatgagcttaagggtgagtttaaggcagagggcattggtctgactattttggcatttattgttaaggcggtggcatatgcacttacccaaacgccgaaatttaatagccatttatcggatgataatacacaaattattatccgcaaatcggtaaatatgggtattgcggtagcaaccgatgatggtttgattgtacctgtgatcaagaatactcaagataaaggtatcaagcagattgccattgagattggtgaacttgccaaaaaagcgcgtgataaaaaactgaccgccaaagacctacaaggtgcaagctttaccatctcaagtcaaggcaatcttggcggcacagcctttacgccacttgtaaactggccacaggtcggtattttgggtgtatctgaagcatcgtatcagccaagatggaatggcaaagaatttgagccacggctcatgttgccactatcactgtcttatgatcaccgtgtgatcaatggtgcggatgctgcggtctttactcgccatattgcaaaattgttggcagatccgcgtcgtatcttgtta

SEQ ID NO: 155 - DNA, 1737 bp, Moraxella catarrhalis
atgactatacatcacttgaaccgtactgtgctggacaggctacggctaatttttaaggtaaatataatggtatcatttgctgaactgtttgaagcaagccaatcagaacaaggtcttaacattgagcgtggctcagtgatttcaggaacagtcgttgctattgacagcgattggattacagttgatacaggtcttaaatctgaaggtatcgttgctcgtgaagagttcttaaacgaagctggcgagcttgaagtggcagtaggcgacagcattgatgttgtagttgaagctgtagataacggcatgggtcaaactgtgctttcacgcgaaaaagcgaagcgtgaagaaagctggcgtgcgcttgaacaactacacgaaaatgatgaaatcgttaaaggcgttatttcatctaaagttaaaggcggtttcactgttgagatcggttcagtgcgtgcattccttccagggtcattggtagatgttcgcccagttcgtgaaacgacacacctagaaggtaaagagcttgaatttaaagtcattaaaattgataaacaacgcaacaatatcgttgtatcacgccgtgctgttatggaagctgaaaattcagcagagcgtgatgagctactagccaagctagaagagggcatggaagtagaaggtatcgttaagaatctaactgaatatggtgcatttgttgatttaggcggtattgatggtctattgcacatcaccgatatggcgtggaagcgtatcaagcacccatcagaagcggtagaagttggtcaagaccttaaagtaaaagttcttaaatttgaccgtgagcgtaaccgtgttagcttgggtctaaaacaattgggtgctgacccatggactgaagttgagcaaacttatccagtgggtaccatcaccaaagcacgtgtaaccaacctaactgattatggctgctttgctgaaatcgctgaaggtattgaaggtttggtgcatgtctctgaaatggatcatacgaacaaaaatattcacccatcaaaagttgttcaagtgggcgatgaggtgaatgtgatggttcttgagattgatggtgagcgtcgccgtattagccttggtatcaaacaaaccatgccaaatccatgggctgagtttgataaaaaccatgaaaaaggtcaaaaaatcagcggtaccatcaaatcaatcactgactttggtctgtttattggcctagaaggtggtattgatggtttggtacacctgtctgatatttcatggactgagtctggtgaagaagccatccgcaattactcaaaaggtgatactgttgaggcggtcgtattgtctgttgatgcagaagcaaaccgtatcagcctaggcattaagcagctaaactctgatccatttaatgaatacttgctatcaaatgatcgtggtgctatcgttaaaggtacagtaaaagaagtggatgctaaaggtgcggtgattactttggccgatgaagttgaaggttatttgcgtgttgcagatattgctcgtgagcgtaccgaagatgcctctaaagtcttgagcgttggtgatgaagtagaagctaaaattgtcggcgttgaccgcaaatctcgcaatatcagcctatcaatcaaggcaaaagatgaagctgatgagcgtcaagccattaaagagctttctaatacagcagctgaaacacagccaaaaacacttggcgatattttcggtgagcagcttaaaggt

SEQ ID NO: 156 - DNA, 1941 bp, Moraxella catarrhalis
atggctttaattcacttaaaaaatattcatttagcctttggcacagcaccgattttagatggcgttcattttaccctaaaacccaatgaacgcgtttgtttgattggtcgaaatggcgaaggcaaatccaccttatttaagctgattatgcgtcaaatacatgctgatgatggtgaggtactcatcaaagatggtacaaaaattgccatgctggcacaagatgtgccaaatgagtcggccagcgtccttgacgtggtgatggagggtgatgacaaagttgcccaagccttaaaaaactatcatcaagccagtgcaaaatgcgccatgggcgacaatgaagcctgtgatgtcatgagcggtcttcagcaaaccttagacgctctgaacggttgggacttggagcggcgtgcgcgtgcattgattgacagcatggggcttgatgccgatgcttgcttatcaacattatcagggggtcgtaaacgccgtgttttgttagcacaggctttggtaacaaatcctgatgtgctacttttagacgagccaaccaaccatttagatattgaaagcatcacttggcttgaaaaatttttattgaatgaacgattaaccgttcttttcatctcgcatgataggaagtttattgatacacttgccacttatatcatcgagcttgaccgtggtcaactctctggctatgatgtgacgcaaggtgtgggtggctatgcacgctaccaagagttaaaagcgcttgaacttgccagtgaagaaaaatcatttgccgaatttgataaaaagcttgcccaagaagaagtttggattcgccaaggcattaaagcacgccgcacccgtaatgaaggtcgtgtccgtgccttaaaagccatgcgtgaagagcgaaaagcacgccgtgatgtgttgggtactgtccaaattagccaaaacaatagcgaaaaatctggaaaaattgtttgtgaagtcaatcacttaactttagaatacgacaataaaaccttagttaaggatttttcaacgctgcttgttcgtggtgataaagttggtatcattggcaaaaatggcgttggcaaaacaaccttaattaaaagcattttgggtttggatgattcagcgattcaatcaggttcggttaagcttggcaccaatctaaatattgctttttttgaccaactcaaagacgacctagaccctgaaaaatctatcgcagataatgtttcagaaggctctgaccatgtcgatgttggtggaaaaactacgcacattttaagctatttgcaagattttttattcacgccaaatcgtgctcgcacacctgttaaagcactatcaggcggtgaaaaagcacgcgttttattggccaaattattgctaaaacctgccaatgttttggtgctagatgagcctaccaatgatttggatatggcaacacttgagcttttagaagattttgtggtcaattttaaaggcacagtattactcatcagccatgaccgtgcttttatggataatgttgttacccaaacttgggtatttgatactgataagtacggcgacggtatcgttttggaatatgttggcggttatgaagactatgtacaacagcatgaaagatggctggctcatcacgccacagacaataaacctaaggcgacaaaacccgccgaacccatccaaatcaaaccacctcaatcaggcgttgcccaaaaacgcaaactcagctataaagagcagcgtgaacttgaagatttgcctaatgaaattgctgcacttgaacaagagcaggcacagcttgccaaaaagattgaagatggttcatggtttaataccgatttggcggcagcaacgaaggctggtgagcgattggtagagattgatgagcttttgatgatgaagcttgagcgatgggatgagcttgaaaatatgacccaa

SEQ ID NO: 157 - DNA, 2274 bp, Moraxella catarrhalis
atgacgcacattgatacaattaaagtcaccaagagagatggtcgccttgaacccattaatcttgataaaattcaccgagtcattgcttgggctgctgaagacttaaataatgtgtctgtttctcaagttgagctaaaatctcatattcaattttatgaggggattcgcacccgtgacattcacgaaaccatcatcaaagccgccgctgacctgatttcggtagaaacgccagattatcagtatttggcagctcgtttggcaatttttcacctgcgtaagattgcttatggaaagtttgaaccaccgcatctgtatgctcatgttaagcatcttaccgaacaaggtaaatatgatcagcacattttggcagattacagtattgatgagtttaatgagctcaatgattatgtggatcataaccgtgatatgaacctagcatatgctgctgttgagcaaatgatgggtaagtatttggtacaagaccgtgtgaccaaacgggtttatgaaagtccgcaatttttatatgtgttggtgggcatgtgtttatttgcaggctatgataaagcacaacgccttgactatatcaagcgtttttatgatgccacctcaaatttttacatctccttacccacaccgattatgtcaggggtgcgtacaccgacacgccaatttagctcgtgcgttttggttgaatgtggcgataatcttgatagcattaatgccacaacatcagcaattgtgcgttatgtctcacagcgtgctggtattggtgtcaatgctggtgctatccgtgcgcttggcagcccaattcgtggtggtgaagcacagcacacaggctgcattccattttttaaaatgttccaagctgctgttaaatcatgttctcaaggcggcgttcgtggcggtgcagcaactttattctacccaatttggcatttagaagttgaaagcttattggtgctaaaaaataatcgtggtgttgaagataaccgagtgcgtcatatggattatggcgtacagattaataaaaccatgtacgccagattaattaaaggcactgacattactttattttcaccctcagatgtcccagggctttatgaagcattctttgccgatcaagaaactttcgagcgattatatacccaatatgaagccgatgaaaatattcgtaaacgcaaagtacctgcccgtgatttatttagcctaatgctgcaagaaagagcaagcacaggccgtatttatattcaaaatgttgaccactgcaacacacatagcccctttgatccgacggtcgcaccgattcgccaatctaatttgtgcatggagattgccctgccaacagcacctttggataacatcaatgatgaaaaaggtgagattgcgctgtgtactttatcagcgattaatttaggtaagattgaaaaattatccgatattgaagagcctgctgagctgatcgtgcgtgcgcttgatgcgttgcttgattatcaagattatcctgtaattgccgccaaaaaaggcagtaccaatcgtcgcactttgggcgttggcgtgattaattatgcgtattatttggcaaaaaatggaactcgttactccgatgcagcggcgcttggtttaacccatcgtacctttgaggcactgcaatattatttgctcaaagcatcaaacaaactcgccaaagaacaaagtgcttgcccttggtttgatcaaaccaaatacagccaaggcattttgcctattgatacttataaaaaggatttggacagcatttgtaccgaacctttgcatcttgattgggaaagtctacgcacaaatatcaaagcctacggtttgcgtaactctaccctatccgccttgatgccatcagagaccagctctcagattgccaacgcaaccaacggcattgagccgcctcgtggtttggtatccatcaaagcgtctaaagatggtattttaaagcaagttgtgcctgagattgaacgcttggcaagtcaatatgaactgctttggaatattcctgataataatggctatctgcgtttggttggaatcatgcaaaaattcattgatcagtccatctctgccaacaccaattatgaccccactaaatttgaaggtggtaaagtcccgatgaaagtgctgattcaagatctgctaaccgcttataaatttggtgtcaaaactttatattatcataatacgcgtgatggtgctgatgatgcccaaggcgacttggacgatggctgtgcaggtggtgcgtgcaagctt

SEQ ID NO: 158 - DNA, 1038 bp, Moraxella catarrhalis
atgattaaaaagcgtggattgggtatgaatcgtgggctagatgtgctgcttggcaacatctcagcagaaaaaaaaatcatcgcaggtgcccagtctttggtggcaagtgccgccagtgaacagaccgaaactaagcctacagcctcaaccaagactaccaaaatcaataaagctaaagcagataaaaaagcaggtaacaataacccagctttggaagctggtatgggtgagaaagtagcacttgttcaaatcgccaccaatcgcctgcaatcaggcaaatatcagccacggcgtgatatgaacgaagcggcactcaatgagctatcactgtccatcaaacaacatggcgtgatgcagccgatcgtcattcgcccacttttgtcagatgagagcaagtccagcgatacggtaacgcacgagattatcgctggtgagcgtcgatggcgagcggcaaaattggcggggcttgagaccattcctgccattgagcgggttttgtctgatgaggttgcgattgctttggcgttgattgagaatattcagcgtgaggacttaaatgtcttagagcaagcagcggcattgcaacgatttcatactgagtttggtatgagtcatgcaatgattgcatccgtggttggtaaagcacgcaccactgtttcaaatttaatgcgattaaatcacctacacgatcaagtcaagcaatatatgatagatggtgtgatggatatgggacacgctcgtgcccttttatcactctcccaagagcaacagcccattatcgccaaaaaaattgttgatggcggcatgacagtgcgagatgctgaaaggctggtcaaatcaattttagatcccaatcctaagcttatcgttcagccaaatcatgaagttttggcactttctcagcagatatcggatgcactgggtgctaaggttaaattaaagcaaggcaaagatggcaagggcagtgtggagattttcttttatgaccatgatgagtttggcgagctggtcaatagactatgccaaatatcagattat

SEQ ID NO: 159 - DNA, 2379 bp, Moraxella catarrhalis
atgaaagataatgcatatcatcgtttaaaaaacaactaccgattacaagcttgcgacttaaaacgctacaccgatcccaatcatctgcccaaatctagccgtctgcatctgcccaaacctgatattgcatttggtcaaagccgtgccatcaaagccttaaacaccgcattagacatacacgccaatggctatcatgtgtttgcagtcggtgaaaatgggttgggcaagcgtacactcgtcacacgccttttggctgagcgtgccaagcatatgccaacaccgaatgattgggtatatgtacatcattttgaagacatacgccgacccattgccattgattttcctgctggtatggcaattatttttcagcaaaaagtccataaactttggcaaaatgccaaaaaaaagctggtcgccaaactgcttggagatactcaccaaaaccacattgaactgataaaatcagccatacccctacaacaaaacaaacgatttgacgctattaatgctgatgccaaacaacataatttggtactaaagaccacaggtgatgggcgtgtgcattttgtggcaattgatgacagcaaacctatagataccaaaaagctcgcccagcttcaaaaacagcttttagaggcacaaattgagcttagtgagcttgaagacagcacgcatgaggcacttgatgagctacatcaaagtactgccaaaaaagtacttgaacccatgtttaacgctgtgatggcaaactttgagaaccacccaaaagccatccgtcatctcatggcgattcaagatgatatggtcaaaaacattacccatatcatcaatgaagatgatgacaattttatcgccaccagtttatcacaagtaccaagccgatatgtcgtcaatatcttggtcagccatcagccatcagctggtgcgccgattgtatttgaagatttgccaacacatctaaacttacttgggcatattgaatataccaccgagcttggtactgtcttaacagatgttagcatgattcgagctggtgcattacacaaagcaaatggcggctatcttttattagaagcccaaagcctacttgaacatccctatgcatggcaaggtttaaagcgtgctttgcaatcaaaacaaatcaaaatctcaagtcttgaacagatgctcactttgacaggcagcctatcgcttgagcccgatagcgtggcattggatgtcaaagtcatcttacttggtgaagctgatttatattatgaattgctagaatttgaacctgaatttaattcggtctttaaagttcgtgccgattttcatgatgacattcaacgagatgactgtagtgaatatggcatggtattaaaaatggtggatatgattaaaagccatcagttgcccaattttgataataccgcatttgctgtaattattgatgaattatccaagcttagcgatgataaaaataagctggacttacacgccgatcgcttgtcaggattattggttgaatctgcacgaatcgctacccttgaaaataacaaaatagtcaccgccaagcatgtacaaaccgcacttgatgacatcactgaacgaaaggggtatttaaaggatttgtattggcaggagattttaaacggtcagcaaattatctgcaccaaaggctgggcggttgggcaaatcaacgcattaaccatcatcagctatgctgatagtgaatttgggctacctgcacgcttgaccgctttgattcagcccaactttggtcaaggtgagattttagacattgaacgagatgttgagcttggtggtagcttacacgccaaaggcatgctcatcatgtccagttttctgcgtgccttatttagcgaatttcatgaattaaatttcagtgcgtctttagcatttgagcaaagctatgggcaaattgatggcgatagtgcaacccttgccgaagcgtgtgcccttttatcggctttagccaatattcccattgcccaaaatcttgccatcacaggttcaatgaatcaattagggcaagctcaagcggtcggtggtgtgaatgcaaaaattgctggattttttgatgcttgccgtgataaagggcttgatggcaatcaaggggtaatattaccacgcgctaatattgcccaactgatgctgcgtgatgacatcgtacaggctgttaaagatgaacaatttcatatttatgccatcgaccacattaccgacgcccttgcccttttgtcaggcatgctcattgatgataaaaataagcatggcgagtataagcgtaatacattgtttggcaaaatcgtcaaacgccttgaaagctgggtacaagatgataaagacgacaaagacaaccgaacagctaaaaac

SEQ ID NO: 160 - DNA, 1287 bp, Moraxella catarrhalis
atgggtaagaatgttgtcgtgctgggtagtcagtggggtgatgaaggcaaaggcaaaattgtggatttgctgaccgaaaaagccacagcggtcgcccgctttcaaggtgggcataatgcaggtcatacattggttgttggcggtgaaaaaaccgttctgcatcttattccatcaggtattttgcgtgagggtgtcacttgtttcattggcaacggggttgttttatctcctgaagcactacttaaggaaatgaatggtttaatcgaaaaaggtgtgcctgtgcgtgagcgtttgcgaatctcacctgcatgtccacttatcatgccttatcataccgcacttgaccaagctcgtgaaatcaaacgaggcagtggcaaaattggcacaacaggtcgtggtattgggcctgcttatgaagataaagtctcacgccgtgcgctcaaagttgctgatttattccgtgcagatttaccagaaaaactagaaaacttacttgaatatcataactttgcacttaccgaatattataaggtagacgccattgattttgataccacgctcaaactgtgccaagaatgggcatctgatcttaaggatttggtcattgatgtgaccgatgcactagagatccgtcgccaaaatggcgaaaatttgatgtttgagggtgctcaagggacgctacttgatattgaccatggtacttacccatttgttaccagctcaaatacaacagcaggcggcgtatctacaggtacaggcttaggacctttatatttagactatgtgttaggtattaccaaagcttataccactcgtgtcggctcaggaccattcccaacagagctgtttgatgatgttggtgctcacttagcaaaagttgggcatgaatttggtgcaacaacaggccgagctcgccgctgtggttggtttgatgcggtcagcttacgccgtgcggttgtattaaactcaatgagcggaatttgtttgactaagcttgatgttttagatggcttagatgagattaatatttgcaccagctatgaagtaccagaaggtgaatgtgctggtgcttatgatgctgaatattatgaaaaagtggtaccaaaatatgaaaccctaccaggttggagcgaatcgacgattggcgtgaccaactttgattcactgcctgccaatgctcaagtatatatcaaacgcatcgaggcgcttgtcggttgccctgttgatatcatctcaacaggccctgatcgtgatgaaaccattgtgttgcgtgacccttatgatgct

SEQ ID NO: 161 - DNA, 1557 bp, Moraxella catarrhalis
atgaaaccagcttcttatgatgtgatcattgttggtagcggattggctgccattaccacagcgttatctttgccaaaagattgccaagttttattaatgtgcaaaggtgaaattgcggatacatcaagccgctttgcccaaggtggtatcgctgcggtgatagcaccaaccgacagcgttcaggagcatgtgacagatacgctcattgcaggtgcagggctgtgcgatcccaacacaaccgagcaaatcattcatcaaggtgctgatgcgattgcttggcttagttctttggcagtgccttttagtacaaccaaagagggtttacacctaaccaaagaaggtggacacaatagacgccgcatttgccatgtcgctgatcatacaggccaatcagtcatggcgtgcctttgggcaaacatgcagactcgcccaaatatccatgtgcttgagcggtgttttgtgacagacattttgactgagcttgatgtaaagacaaaaaaagtgcattgtaaaggtgtggtatgtctcatcaatcaacaatccaaaaaatatgatgccgataaagtagtgcttgccactggcggcttagggcagatttatcaatataccacagcgccagaggtgtgtactggtgatggtattgctatggcatatcgagcaggttgccgcattgtgaatgctgaatttgttcaatttcacccaacaggttttgatgatggtatggctcaaacagcactgatctcagaagcggttagaggcgagggtgggcggctcattaatgctcaaggcgaacgctttatgtcaaattatgatgagcgtctagagcttgcacccagagatgttgtcgcaagaagcattatcaaggaggcccagcgtaccgctcagggcgtatttttggatatcagccatcaatcagatgaatttatcaagcagcattttccaaaaatttatcaatcttgcttagccaaaggcgtggatataaccaagcagccaattcctgtaacgccagtacagcattatttttgtgggggtgttttgacagatgtcagcgggcgaagtgatgtggtgggtttgtattgtttgggtgagatggcatatacagggctgcatggtgctaatcggttggcgagtaattcactgctggagtgtttggtgatgggtcaaaatgctgccaaatctttgcaagaacctttggcgaaatggtcaaatcgtgatgtactgcctaattggtcggttcaaacgcatcaaaaggatattaatctggcatcaagtataccattggatgtcgctcagattaagcagctgatgcagcaacatcttggggtaatgcgcaggcaagaggatgtggcgaaaacggtagagcttttggcagggggtttggctgatttgtccacccagaatctcactacccaaagccaaattcaaaagcttaatctcaccatgtgcgcttatttggtcgcaaaagcaagcttagatcgcccgcatagcattggctgtcattattgggtagaaaatgagccaaatctgatagcaccaaatcgactgccaaaagttgta

SEQ ID NO: 162 - DNA, 855 bp, Moraxella catarrhalis
atgaaaacgccattatttgcattgcctgatgccctactaatacccacagtccaagcagcacttttagaggatttggggcggcgtggtgatgttacctcggctgcggtcattgccaaaaatagcaccgcaaatcttgccatcgtaagccgtgatacaggcattttggcaggcatggatttggcaaggttggcttttgaatgtattgataaaacaatcaactttagcccaaatgcctcagatggggatactatcaaatcaggtcaagtgttggcttatgtatcgggcaatacccaagccttattacaagctgaaagaacagcactaaattttttgacacatctaagcggtatcgccagcatgaccgccaaagcagtcgcccaaatatcacacacacaagccaaaattacctgcacacgcaaaaccacaccacttttaagaaatctacaaaaatacgctgtgcgagcaggtggcggctgcaatcatcgaatggggctagatgatgcgatcttaattaaggataatcacttgatttattcaggtacgcttaaacagaccatcgccaacgccaaagcagctgcagggcatcttatccccattgaagttgaagtggataccatcgcacaacttgaagaagccttggaggctggcgcggactttgttttgcttgataatatggataacgataccctaaagcacgccgtatcactttgccaaggcagagcaaaaacagaggcatcaggtggcattacctttgaacgactaaaaacggtggcggattgcggtgttgattatattgctttgggttatctcacccacagcgtgatcaatcatgatattggcttggattttttggat

SEQ ID NO: 163 - DNA, 1494 bp, Moraxella catarrhalis
atgaaccaacctacaaatcaatctacgacccaaccctcatcgattccgcttaactgccccaatctgctaaagcaagcctgtttgattgatggagagtgggttggtgctgattctggtgaggccatcgcagttaccaatccattcacaggcgatgtgcttggtacgatacccagcttatcaaaacaaaccgttctaaacgccgttgagtgtgctgatgctgcccaagaaagctgggcaaataccaccgccagtgagcgtgccaaacttttgcatgcttgggcggatctgatcgatacacacaaggaagatttggcactgatcatgacctatgagcaaggcaagcccatcacagaatcacaaggtgagattgattatgccaatagcttcatacgctggtttgcagatgaaggcaaacgcatctatggcgatgttattccaagtaccaatcagtcgctacgctatgtggtactcaagcagccagtcggtgtgtgtgctgcgattacgccttggaatttcccttcggcaatgattgctcgtaaagctgcacctgcgttagcggctggctgtaccatgatcatcaagccagccaccgagacgccattttcggcattggcactgggatatttggcaaaacaagcaggcattcctaaaggtgtattacaaattgttactggtaaatcctctgtggtcggcgaggtgctgaccaaagatccacgcattcataagctgtcattcacaggttctaccgaagtggggcgagtactgatggagcaatgtgcaagcaccatcaaaaagctgtctatggagcttggcggtaatgcaccttttatcgtctttgatgatgccgatcttgaaaaggcggcagaagggctgattgcttcaaaatatcgaaacgctgggcaaacttgcgtgtgtgccaaccgtatctatgtccaaagttcaattaaagatgagtttttggcgaaatttaaacaaaaagtagaagtactgaaagttggcaatggtgctgatgaagcaaccgatatcggaccgcttatcaatcaacaagcactcaaaaaagtgcaggcacttttggatgatgcgctaaacaaaggggcaacgctaatcacaggtggcgtgccacatgacgcaagccaactgtcatttaccccaactgtcatcagtgatatcaccgatgagatggatcttgcccatgaagagatatttggtccgattgctccgatcatgacttttgaagatgaaaaagaggtaatccatcatgccaatgataccatttatggcttggcggcgtatttttatacccaaaaccatgctcgtgcttggcgtgtttcagaggcactagagtatggtatggttggtcaaaatacagggcttttatcaactgaagttgcaccatttggtggtgttaagcaatcaggttttgggcgagagggttcaaaatacggtattgaagagtatattaccaccaaatattggtgtatggatatcagcaaa

SEQ ID NO: 164 - DNA, 816 bp, Moraxella catarrhalis
gtgtcaaaaagtaacgcccaaaccccacaaccacagaacaaacaggagcatgttatgacagcaaccatcaaatcagccatcaaacctttattcatcgccatgatggtcatgggggcaacatcagcccatgcagaccttaccgtgtatgccgctgccagcatgaccaatgctgttgaagacatcaataagttgtatgaaaaaaaatacaacagcaaagtaaaaacttcctttgccgcctcatctacccttgccaaacaaattgagcaaggtgcgcctgctgacatttatatctcggcaaacacctcttggatggattatcttgccaaaaaagataagattgttagcagcagctacaaaaacctattgggcaaccgcttggtgatgattacccccaaaaacaaccccatcaagaccaacatcaaaatagacaaatcctttgacatcggtaatgcctttacaggcaagctatgcactggcaacaccgctagcgtgcctgtgggcaaatacgccaaagaagccctaaccaacctaggttggtgggacaccatcgggccacgtttggtagagaccgaagatgtgcgtgctgcgttaaactttgtgaaccttggtgaatgccagttgggcattgtctatgccacagatgccaaagtggttaaaaatgtgcaagtgattaacaccttcccaatcaccacacacacgccgattgtctaccccatcagcatggttaagcaaagtcgtgaagcccagcagtattataactttttacagaccaaagaagccaaagcggtttatcgcaaatatggttttagtgtcttg

SEQ ID NO: 165 - DNA, 1536 bp, Moraxella catarrhalis
atgaaaattcgctcacaagttggcatggtgttaaaccttgataaatgtatcggttgccatacctgctcagtcacttgtaaaaatgtttggaccagccgagagggcatggaatacgcatggtttaacaatgtggaatccaaacccggtatcggttatccaaaagaatgggaaaaccaaggtaaatggaaaggtggttggatacgcaatgcagatggctcaattaatcccaaaattgggggtaaatttagagtgcttgccaatatttttgccaacccagatttgcccatgatagatgactattatgaaccatttgactttgactaccaacatctgcataccgccccaattggtgaacatcagcccattgcacgccctcgctccttaattacaggcaaacgcatacaaaaaattgaatgggggccaaattgggaagagattcttgggtcagagtttgctaagcgtcgccgtgataagaattttgatgacatacaagctgacatctatgggcaatatgaaaacacctttatgatgtatttgccacgcctatgtgagcattgtctaaacccaacttgtgtggcatcttgtccaagtggggcaatttataagcgtgaagaagatggcatcgtgctgattgaccaagacaaatgccgtggctggcgtatgtgcatctcaggctgcccttacaaaaaaatctattacaactggaaatcgggcaaatcagaaaaatgtatcttctgttacccccgtattgaagcaggcatgcccaccatctgctctgaaacttgtgtcggtcgcattcgctaccttggcgtattattgtatgatgcagacaaaatccacgaagttgccagcctatcaaatgaacaagatttataccaagcacaacttgatattttcttagacccacatgaccctaaagtcatcaaacaagccttacaagacggcgtgccaatgagcgtcatcgaatctgctcaaaaatcccctgtctataaactggcagtcgattggaagcttgctctgcccttgcacccagaataccgtaccttgcctatggtgtggtatgtgccaccattatcacccattcaaaacgccgccgaagcaggtcaagtgggcatggacggactgattccagatgtggacagtttacgcattcctttaaaataccttgccaacatgctcaccgcaggcgatgaagagcctgtacgcttggcattaaaacgcctgcttgccatgcgaagctataaacgcctacaattggttgaaaaacaagatgctcaagaagtgttagacgctgttggcttaagcgttgcccaagtggaggacatgtaccgctatcttgccattgccaactatgaagaccgttttgttatcccaaccgctcaccgtgaagaagctctaagcgatgcgtttgctgaacgcaatggttgtggctttacctttggtaatggttgtacaggaggtaatgacacccacatgtttggacaaaagaaaaataataagcgtgattttatcaaaaccgtacaaacatgggagcta

SEQ ID NO: 166 - DNA, 3753 bp, Moraxella catarrhalis
atgagccatttactcgaccaactgcgattttttaaaagaaaacaaggtgaatttgccaacagccacggtgagactcgccatgaaaaccgtgaatgggaaaacagctatcgggcacgctggtcatatgacaaagtggtgcgttctacacatggggtgaactgcacaggttcatgctcttggaaaatctatgtcaaaaatggtctggtaacctgggagacacaacagacggactatcctcgcactcgcccagatttgcccaaccatgagcctcgtggctgtcctcgtggggcaagctatagctggtatatgtattctgccaaccgcttaaaatacccaaaagtgcgtaaaccattattaaaattatggcgtgaagccaaagccaaacataccgatcctgttttggcatgggcaagcattgttgaaaaccctaccaaatctgctgaatacaagtcaaaacgaggcttgggtggttttgtacgctcatcttggcaagagtgtgcagaaatcattgcagcagccaatgtttacaccgctaagacctttggtcctgaccgcatcattggtttttcacccattcctgcgatgtccatgctcagttatgcgtcagggtcaagatatttatcgctcataggtggtgcatgcttgtcgttttatgattggtattgcgacctgccgccagcttctcccatggtttggggtgagcagaccgatgttgctgaatctgctgattggtacaattccgattatatcattgcgtggggttcaaatgtgccacaaacccgtacgcctgacgctcacttttttaccgaggtgcgttataaaggcacaaaaacggttgccattaccccggattatgccgaaattgccaaactttgtgacctatggctgaacccaaaacaaggcacagatgccgccttggctcaagcattttgccatgtcatcatcaaagagttttatctgaaatctcaaagtgattacttccaagactatgccaaacgctacacggatttacccatgttggtggtgcttgaagaaaaagacgataagtttaaagcagggcgttttttacgggcatctgacttaattgacaatttaggtcaagaaaataatcctgaatggaaaaccatcgccatgaaccaaaatggtgagcttgtttcaccttatggctcaatcggttatcgctggggtgaaacagggcgttggaatttggaaaataaagaaggtcaacataatggcgacgtggatttgactttgtcattaaaaggttctggcgagacggcaagcgttggtttggactattttggtggtgatgaacacccctattttaccgctgccgctggtgatgccattcagtataaaaacattccttgccataccatcagtcttgccaatggacaaaccgccaaagtcgccaccgtttttgatttgatggttgccaatttgggggttgataatgggcatggtggtcaaaatgtcaccgatgattacaatgatgccaacatcgcaggtacgcctgcttggcaagaaaaaatcactggtgtcagtcgtgaaaaggtgattcaaatcgcccgtgaatttgccgaaaatgcccacaaaactcaaggcaaatccatggtcatcatcggagcaggcatgaaccactggtatcatcttgacatgaattatcgtggtgtgattaatatgctgatgctctgtggctgtattggcaaatcagggggtggctgggctcactatgtgggtcaagaaaagctcagaccacaatctggttgggcgcctgttgcgtttggattggattggcacagaccaccacgccacatgaatggcacaagctttttttacaatcactcaagccaatggcgacatgaaactgtctctgcccatgaattgctttcatctcatgccaataaatcgcaatttccagagcatatgctcgattacaacattaaagctgagcgggcaggttggttgccatctgccccccaattaaaccaaaatccactgaccattgccccccaagcaaaagccaaaggcatgagtgttcaagattatgtggttgaaagtctgcacaatgggtcattgcgttttgctgccgaacaacccgacaatccgcaaaatttcccacgcaatatgtttatctggcggtcaaacttactgggttcatcaggtaaagggcatgagtacatgctcaaatacttgttagggacaaaaaatggcttattgggtgatgaaacggtacaaactggctttaaacccaacgaaattgactttgttgaaaatgccccaacgggtaaaattgatttggtaaccaccttagactttagaatgtccagcacatgtttgtattctgacattgtactgcccaccgccacatggtacgaaaaagaagacatcaacacatcagacatgcacccatttatccacccattcaccgctgccactgaccctgcgtgggaagcaaaaactgactgggagatttataaatacatcgctaaggcattctctcgcctttgtgttgggcatttgggaacacaaaccgatgtggttaccttacccatgcaacatgacagtgccgatgaattggctcaaccctttggtggcacagattggaaaagtgcaggtgaaaaacccatacccggcattaattgcccactcatcaaagttgtggaacgagattatcccagcacctatgccaagttcacttctcttggtcctttaatggacaagcttggtaataactctaaaggcattgactgggacaccaaagaagaagtgcaacaattggggcagttaaattatcgcattcatgatgacagcgtcgccaacacacgccccaatatgagcagtgtcgtcaatgccattgaaaccgtactgatgcttgccccagaaaccaacggtcatgttgcggttaaagcatgggcagaattatccaaaaaaacaggacgtgaccacactcatttggcaaaagccagtgagcatgaaaaaatccgctttaatgacattgttgcccaacccagaaaaatcatttcaagtcccacatggtcagggcttgaatctgacaaagtcagctacaacgcaggctacaccaatgtgcatgaactgattccatggcggacaatcacaggccgtcagcaattttatgttgagcacccttggatacaagcctttggcgaacaaatgcaacaataccgtccgccaattgacaccaaaaccacccaagcatttaaaaaatatcaatccaatggcaacaaagaaattgtgcttaattttttaacaccacaccaaaaatggggcattcacagcacctattcagaaaacctattgatgctcaccttaagtcgtggtggtccaattgtttggataagtgagattgatgcccaaaaagcaggcattgaagataatgattggattgaagtctttaatgccaacggggcaatcactgcccgtgcggtggtcagccagcgagtcaaagaaggcatgaccatgatgtaccatgctcaagaaaaactggtgaatatcccaggttctgaaaactcaggtactcgtggtggtattcacaactcggttactcgcaccatcttaaagcccactcacatgattggtggttatgcccaattctcttatggctttaactactatggtacggttggttgtaaccgtgatgaatttgttgtggtgcgtaaaatggcaaatattgactggctagagggcagggctgatgatgaattgccacgcccattacccaccactttggac

SEQ ID NO: 167 - DNA, 2883 bp, Moraxella catarrhalis
atgatgataacaggtaataccatgaaccaaatttttcatttgatgacacaaaccaagcatacaaatcacaccaaaaaggtgctaaaactgagcatgctgtccttgtgtttgctacacatcacccaaactgccatggcagaggatacccttaaggatgtgccaaaagcaacggatttttctgtcatcttagatgaggttgttgtaacggcgaccaacggcaccaaaaaatcccaaaaaccctttaccaaagcatcggccaccagcgtgcgagaaaatgtatttaatgccagtgagaatattgatgccattgtgcgcagtgtgccaggggcgtttactcagcaggataaatcctctgggctggtatcattaaatgtacgaggcgatagtggatttgggcgtgccaatagcatggttgatggtgtaacccaaaccttttacagcacctcaaccgatgctgggcgtgggggtggcacctcacagtttggtgcggtgattgaccaaaatttcattgcaggcgttgaattaaacaaaggcagttttaatggcaaaggtggtatcaacaccttaacaggttcggccaattttcgtacgctaaatgctgatgatgtgattaaagatgacaaaaattttggcttcattgccaagggtttgaccggtaaaaatgcgacggataaaaattttatgctggcagctggcggacgtggatggcttgataatggcagtatcagtgctttatatgcttatagccacaaagacattagccaaaattataaagttggcggtggcgggacgcacattggcaatgttggtgatgatttgctacttagtaaacaaaaacaagtttttgccaaagagcatgcactcacttacaatgaagccagccgttcctggcaaaaagatttgaccaaattagataaagaaacaggcaagcctttatgggacagaaaatatcaatttggcggtaagtgctatgggctgggctgtattgatacaaaagagaagtttgatgaatatgttgctgacaaacagcagcagtggcaaaagcatggtgcaaaagagtacagcatcacccccattgatatcaccgccctaaaccaaacctcaaaaagccatttggcaaaaattcgttacaacaatgacaccagcgatgttggtctacaactgcgtaaaatggacaccacgataggcagtcgccgtatcagcaatgataattatcaacttgatgctgcttacaacccaaatgagatcattgatttaaaagtgttggcagcccataatgtgggcgtacaaaaataccccaaaggttcaacttttacaggctggaaattggataaagactttgaaaccaaaaacactgccaatctttttgacctgaacaacactcacacctttaatctgccaaagcaaatggatttgaccacaaccgttgggctgaacatattgcataatgaatattcaaaaaatcgcttcccagatgagcttgggctattttataccaatgatttattatgtggcggcggttatgatgcctgtggtggtcgttttcaggggacaagcagcacactgccaaaaaaatcggtgattgtacagccctcaggcaaacagcgttttcattctatttatttggacacatcattacaaaaagacaaatatcagttagattatagcgttaatgccagtcagtaccgttttagtggtgagcatgccagttattatagcagccaaaaagagtttcaagataagtttggtgaagattcgcaaatttataaacagcactgctcgccaagttgtgatgtgtatgagcctttggtaaccacttctggtaaaaaacacgccatcaaccattctgttactttaagtgccaaatatgacacaggttttatgccttttgtcagctttgcacgcacgcacagaatgcccaacattcaagaaatgttcttttctcaaattggtgatgttggcgtcaatactgcattaaaaccagagcaagccaatacatatcagttgggttttaatgtttttaaacgcaatctattgacagacaacgatactttggggctaaaagtagtgggttatcaaagccgtattaacaattacattcataatgtttatggtaaatggtatgacacaaaaaatccacccagttgggtgaccagtggtgcattaaaaggcgataccatacagcatcgcaactggcaaatgcctgtgcataaacagggcttagagcttgaaatcaactatgatgctgggcgatattttaccaatttgtcttatgccagacaaaagaccgaccagccaaccaattatagcgatgccagcgagtccccactaaatagctcaaaagaagaccaattaacccaaggctatgggctaagcaaagtgtcaatgttgcccaaagattatggtcgttttgaacttggtgtgcgtgcatttgacaacaaactcaccatgggcagtgcggtgcgttattatggacaaagcccacgagcgaccattgaacccagatacattgatggcacgcatggtggcaatacatcgcattcagatgataaaggtgctcatgtcatcaagcaaattgagatgctaaaaagacagcctttggtgcatgatttttatgttgcttatgagccaataaaagatttggtgatgcgtcttgatgtgcaaaatgcgtttgataaactgtatattgaccccttagatgccaacaatgatgccgccactcagcgttattatcattcatattataatgatgcagacgaaggcgcaccttgtgcagcggggcagttgtgcaagcctgatgcaaaatacggcggtactactcgctcggtattgaccaattttgccaaagggcgttctttattattttcaatgacttataagtgg

SEQ ID NO: 168 - DNA, 747 bp, Moraxella catarrhalis
atggcaggtcatagtaaatgggcaaatatcaaacatcgcaaagccaagcaggatgctgcaaagggtaaaatttttaccaaaattatccgtgaaatcgtttcagccgccaaatcaggtgatccagaccctgccaataaccctcgcctgcgtgccgttctagaaaaagcaaacgccgccaacatgaccaaagatgtcatcaagcgtgcgattgagcgtggtgctgggggtggtgataatgacaatatggaagagattacctatgaaggttatggtattggtggcgtagcggtcattgttgaaaccatgactgataatgtcaatcgtactgtcggcgaggtgcgtcacgcctttagtaaaaatggcggcaatctgggtacttcaggttcggttgcgtatttatttagtaagcgtggcgaaatcatctttcatgatttaagcctagaagatagcatcatggagattgccttagaagctggtgcagaggatatcgaaaacgatggcgaaagccttttggttatcacctcgcctgcagattttggtactgttgttgatgcactgattgctgctggattgacgccaaatagcatggaggttaccatgtcgcccagtacgacagcggacattgataatattgatgatgctcaaaaagttcttaaaatgattgacatgcttgaggatttggacgatgttcaagaggtttataccaatgtcaattttagcgaagcggtcatggcaagccttgatgct

SEQ ID NO: 169 - DNA, 498 bp, Moraxella catarrhalis
atgaccataccacgatcgattctttttgtttgtttgggtaatatctgccgaagtccatccgctgaagctgtcatgcgtgccaaactgaccaattttttgcctgatgtttatttggattcagcaggtacagcgggctatcacattggcaatccacccgatccacgcgccatcgccactggtgagtcacttggttttgagttaagtcggcttcgtgcacgccaagtttctttggaagatttttatgaatttgagctcatttttgcgatggatgacaccaatttatcagacttacaaactcttaaaactactgccatgatgcatgctaatggtcgagatatggcaaagcttagcttatttgatccagaaggtcggtcggttgctgacccttattatggcgatgagcaagattttgagcaaatgtacacccatcttcagcaaattgccgatcggtatatcacggtatggcagcttgatcatcaagattcactggctgcggat

SEQ ID NO: 170 - DNA, 3099 bp, Moraxella catarrhalis
atggcagtcattcatatagatggcaaaacttatgatgtggacggctcggataatctgctctcagcctgcctgtcgcttggcattgatgtgccttatttttgttatcaccctgtcttaggttcggtcggttcttgtcgtcagtgtgccgtcaaacagtataataacgccgaggattatcaagcaggcaaagggcggttggtgatgagctgtatggttgcccccagcgatgacatgtacatctctgttgatgatgatgaagccaaggcatttcgcaaaagcattgtggaatacttgatgaccaatcacccccacgactgccccacttgtgaagagggtggtcattgccatttgcaagacatgacttatatgtcaggtcatcatcgtcgccgttaccgctttaccaaacgcactcaccacaatcaagagcttgggccttttatcgctcatgagatgaaccgctgtatcgcctgctatcgctgtgtgcgattttatcaagattatgcaggtggcgatgatttgggcgtgtatgcgtctaataaccgtgtttattttggtcgcccagaagatgggcagtttgacagtgagtttagcggtaatttaaccgaagtgtgtcccacaggggtgtttacggataaaacccattctgagcgttacaatcgtaaatgggacatgcaatatgccccaagcatttgccatggctgttcggcaggctgtaacatttcagcaggtgagcgttatggcgagcttcggcgtattgaaaaccgctataatcacgatgtcaatggctactttttatgcgaccgtgggcgttttggttatggctatgttaaccgagcggatagacctacccatccccttaaaaaggtgaatggacaatttgtcaaaaccagtgcagaccttgctgtggatggtgtggcggacttgctaaaaggtaaaaatgtgattggcatagggtcagccagagccagtttggagagtaattttgccctaaaaagactggttggagcaaacaattttagcacaggcgagcgagcggccgtcaaagatgtggtggatttgggtgtggcattattacgccatgaagcggtgcatcaggcatcattggcacagattgagacggcagatggcgtgtttattttgggtgaggacattacccaaacggcaagccgtgttgccttgtcagtacgccaagcggctaagaataaagcccgccaaatggcaagtaccctaaaaactgagcattggcttgctgaacctgtcaagcgtatcggacaaagtgcgtacagtccgatttatgtggcgtgtgtggcagatactaagctatccgatattgccaaagtgtccgctgttgccacaccagatgacattgccaaattgggctttatggtgggtgatgtcatcaaggcgtatgctgacacgctagatgagattggaaaaagtgagaacgccatttttgccaaagaaaaacagacggatttggtgattgatgatgagatggcgatgcaatttttggcacatcatatcgcttatgatttgattatggcaaatcgcccacttgttgttacaggcaccagtttgacatcaaaagtaatcgttcaggccgcaggttacattgcccaaaccttgaccgccaagcgcgccaaaatcgcccatgtggagcgtgaatttatagaagtgcaaaacgccaaaatccgtgatgaggtcgcccgtcagttcattgaccctgacaaggatgccaaaacggacggcacgcacaccacagagcgagacccaaacgactttgaaaaagagctgtcatctcgtctattaaagataaatactctgtatgctgataaaacaggcgtgtatgttgccatgccggaggccaatagcgtgggtgtgaatttattgggtgggcaggcgatggaggaggttttggcacaagcatttgaggcggcggtcgtgttagaacatgatttgtcaaatctgaccccaaaccaatttgacaaattaacacaaaaaacactcatcgtactagaccatcagtcttatgaatggcatgataaagctgattttgtgttatcaagtgcatcatttgctgaaagtgatggcacgcttgtctctgctgaggggcgagcagggcggttttttgcaagctatgataaaaaatattatgaaccaaccagcgagctaaaagacagttggcgttggctacatgcacttgacaatgccatgacaaacaagatgggtgaacccatctggcgccatcttgatgatgtcattgatgagctggttgtagagtatccacaccttgctcaaatcaaagatgctgccccagagtcagattatcgcattacagggctaaaagttgcccgtgagccacgccgttattcggggcggacggtgttacgctcacctatttctattcacgaacccatgcaacctaaggacttagacagtggtttgactttttcaatggagggttatgtgggcgataaaaccaatccaagccttatcccttttgcgtggtcagcaggctggaactccccacaagcatggaacaaataccaaaataaagtcggtgggcgattaaaaggtggcgatgtgggcattcgtctgtttgaaacactgccaaagacgcaaatggtgtttgggcgtgttgatattgatcatgtgaatgttgctacaagcattttttatggtcgtgcggtgattgtgcctgtacataacctatttacaagctcacgcatgataagccgtagccctgtggtagcaagccaaatcaaacctgccatgtggatgataaaccatgatgatgcagagcgttggatggttaaggtgggcgataaattaaccctaagccagcatggggcagagattaccttgcctgtggaggtggtggattatttggcagacggctgtattggttatcctgatggtgctgtaccgcttatggtcggtataccaacgactgtcaaaaaagcagataaggacacgcctgtctatgtgcctgaccatcaaaagagcatgcagagattggcaagtatcaagcgtgagaatatctttacaccaaaggcagggtttaataacgcaccgtttgcgatgaataaagtgggggca

SEQ ID NO: 171 - DNA, 1416 bp, Moraxella catarrhalis
atgaataagccaaatgtcagcgaacagattgacgctcgtaaaaatggacttgccccaagccagcttaaccgccaaaaaacgccaatttggggcgtgggactgacggacgggcaagcaccaacgtcacttacgcaccctttgacatggcgactgtatcatcatgatgcactgctgacactggcagattatgaagccttggacggttttgttggcttaaaaaacgccttgaccaaatcacccaaagaggtcggcgagatgataaaaaccgccaatgtgcgtgggcgtggtggggcagggtttaacgcagggctaaaatggacattcatgaccccgcctgatgggggcgtgcgttatttgatttgtaatgccgatgagatggaacctggcacattcaaagaccgcttattgatggagcgtctgccttttcagctcattgagggcatgctcatcagtgcctatgccattggggcgagcgtgggttatgtctttatccgtggtgaatatgtcctagctgccaagcgcttacaaaatgccattaatgagtgtgttgccaatcacttgctgggtgatgggattttggggacagagtttaactttactttgcatgttcacacaggggcggggcgatatatttgtggtgaagagacggcactcattaactgtttggagggcaggcgtgccaacccacgcaccaaaccaccatttccccaagtctcaggggcgtggggtcgcccaacggtggtgaataatgttgagacactaaacaacatgcctgccattttgttaaatggggtggattggtatttggatttgccaaaagccaagggcaaatccaccacccctggcaccaaaatcatgggcgtgtcagggcgtgtcaaagatgcagggctttgggagttgccatttggtcataccgcaagagagttaatagagctggcagggggtatgcaagaggggcttagcttaaaggcgtggctaccaggtggggcgagtaccgactttttaaccgcaagtgatgagcatttggatttggtgatggactttgaccccatcatgaaggcgggtagtcgtttgggtacttgcttgatgatggtggtggacgaaagccaagacatggtgagtttgtcaaaaaatctacaacagttttttcagcgtgaaagttgtggctggtgtaccccttgccgtgatggcttaccgtggggcgttaaaatccttgatgccatggataatggacaggcccaagcggacgacattgacaaactctccgagctgacacgagatttgtggcttggcaaaaccttttgcgctcatgccccaggggcgatggagccactcatgagtgcgttaaaatatttccgtcatgaatttgagcaaaaagtgaacaactcaaaaccacaacaaaacaaggtgggggtg

SEQ ID NO: 172 - DNA, 2124 bp, Moraxella catarrhalis
atgaaacacattcctttaaccacactgtgtgtggcaatctctgccgtcttattaaccgcttgtggtggcagtggtggttcaaatccacctgctcctacgcccatcccaaatgcaggcggtgcaggtaatgctggtagcggtactggcggtgcaggtagcactgataatgcagccaatgcaggcagtacaggcggtgcaagctctggtacaggcagtgccagcacaccagaaccaaaatatcaagatgtgccaaccgataaaaatgaaaaagctgaagtttcagacatacaaaaacctgccatgggttatggcatggctttgagtaaaattaatctatatgaacaaaaagatatatctctagatgcaaataatatcattaccttagatggtaaaaaacaagttgcagaaggtaaaaaatcgccattaccattttcgttagatgtagaaaataaattacttgatggctatatggcaaaaatggataaagcggataaaaatgccattggtgacagaattaagaaagataataaagacaagtcattatctgaagcagagcttgccgaaaaaatcaaagaagatgtgcgtaaaagccctgattttcagaaagtattatcatcgataaaagcaaaaactttccattcaaatgacggaacaaccaaagcaaccacacgagatttaaaatatgttgattatggttactacttggtgaatgatgccaactatctaactgtcaaaacagacaaactttggaattcaggccctgtgggcggtgtgttttataatggctcaacgaccgccaaagagttgcccacacaagatgcggtcaaatataaaggacattgggactttatgaccgatgttgccaacaaaagaaaccgatttagcgaagtgaaagaaaaccctcaagcaggtcggtattatggagcatcttcaaaagatgaatacaaccgcttattaactaaagaagactctgcccccgatggtcatagcggtgaatatggtcatagcagtgagtttactgttaattttaaggaaaaaaaattaacaggtgagctgtctagtaacctacaagacagccgtaagggcaatgttacgaaaaccaaacgctatgacatcgatgccaatatcgacggcaaccgcttccgtggcagtgccaccgcaagcaataaaaatgacacaagcaaacacccctttaccagcgatgccaaaaatagcctagaaggcggtttttatggaccaaacgccgaggagctggcaggtaaattcttaaccaatgacaaaaaactctttggcgtctttggtgctaaacgagataaagtagaaaaaaccgaagccatcttagatgcctatgcacttgggacatttaacaccaaaggagcgaccacattcaccccatttaccaaaaaacaactggataactttggcaatgccaaaaagttggtcttgggttctaccgtcattaatttggtgtctaccgatgccaccaaaaatgaattcaccaaagaattcaccaaaaacaagccaaaatctgccacaaacgaagcgggcgagactttgatggtgaatgataaagttagcgtcaaaacctatggcaaaaactttgaatacctaaaatttggtgagcttagtgtcggtggtagccatagcgtctttttacaaggcgaacgcaccgctaccacaggcgagaaagccgtaccaaccgaaggcacagccaaatatttggggaactgggtaggatacatcacaggagcggacacaggagcgagcacaggaaaaagctttaatgaggcccaagatattgctgattttgacattgactttaaaaacaaaacagttaaaggcaaactgaccaccaaaggccgcacagaccctgtatttaacatcacaggtgacatcacaggcaatggctggaaaggcaaagccagcaccgccaaagcggacgcaggaggctataatatagattctaacggtacaaacaaatccatcgtcatcgaaaatgccgaggttactgggggcttttatggtccaaatgcaaacgagatgggcgggtcatttacacacaacaccaatgacagtaaagcctctgtggtctttggcacaaaaagacaagaagaagttaagcag

SEQ ID NO: 173 - DNA, 1536 bp, Moraxella catarrhalis
atgctcgcttttttgataggagctgtcatgacaatcacgcctgtttataccacattcacccccaccaaaacacccataaaattttttatggctggcttgacttttctaatcgctcatatcagccatgccgatgatggtcgcaccgacaatcaagagccaatcaatcaagaaatagccacccttgaacccatcattaaccatgctcagcctgagttattgtcccatggtgcattaacaccaaaaacagaaccaatactggcacaaacaccaaatcctgccgaagatacgctcatcgccgatgaggcgttactgcttgataaccctgatttgctcaatcacgccctaaattctgctgtcatgaccaaccatatggcaggcgttcacgcattattgcccatttatcaaaaactgcccaaagaccatcaaaatggcattttacttgggtatgccaatgccttggctgctttggataagggcaacgccaaaaaagccattgatgagctgcgtcgcatcatcgccatcatgcctgaatataatgtggtgcgttttcatctggcaagggcattatttatggacaaacaaaatgaagccgcccttgaccagtttaataaattacatgctgataacttaccagaggaggtgcggcaggttgttgggcagtacagacaagcgttaaaacaacgagattcatggacatggcaattaggcatgaatctggccaaagaagacaacatcaatcaaacccccaaaaacaccacgcaaggtcaatggacttttgacaaacccattgatgccatcaccctaagctaccaattgggggcggataagaagtggtctttgcccaaaggggcatatgtgggagcgaacgcccaaatctatggcaaacatcatcaaaatcacaaaaaatacaatgaccattggggcagactgggggcaaatttgggctttgctgatgccaaaaaagaccttagcattgagacctatggtgaaaaaagattttatgggcatgagcgttataccgacaccatcggcatacgcatgtcagctgattatagaatcaacccaaaatttcaaagcctaaacgccatagacatatcacgcctaaccaaccatcggacgcctagggctgacagtaataacactttatacagcacctcattgatttattacccaaatgccacacgctattatcttttgggggcagacttttatgatgaaaaagtgccacaagacccatccgacagttatcaacgccgtggcatacgcacagcgtgggggcaagaatgggcgggcggtctttcaagccgtacccaaatcagcatcaacaaacgccattaccaaggggcaaacctaaccagcggtggacaaattcgccatgataaacagatgcaagcgtctttatcactttggcacagagacattcacaaatggggcatcacgccacggctgaccatcagcacaaacatcaataaaagcaatgacatcaaggcaaattatcacaaaaatcaaatgtttgttgagtttagtcgcattttt

SEQ ID NO: 174 - DNA, 315 bp, Moraxella catarrhalis
atgaaaaatttaaccaataaactgttggctggtgtgctaagtgctgctgttttgttgcctgccgttggtatctctaccaccgcagttgctaacgaccgtattaaagcacaagcttatggcgacagcaactttgcccaaaatcgtcaaaaagccattcaaatgcttgctgctcgtggctatcaagtcggcgatatagaagttgatgactttttaggcaagcctgtctttgaagtagaagcctataaaaacggtgctgagtatgacatcgttcttgaatacccatcacttaaaatcatcaaagagcagcgtgattac

SEQ ID NO: 175 - DNA, 3279 bp, Moraxella catarrhalis
gtgattggttggggtgtatcggtgtatcaaagtgcaaaagccaacaggtggtcattgatgaatcaatcaaaacaaaacaacaaatccaaaaaatccaaacaagtattaaaacttagtgccttgtctttgggtctgcttaacatcacgcaggtggcactggcaaacacaacggccgataaggcggaggcaacagataagacaaaccttgttgttgtcttggatgaaactgttgtaacagcgaagaaaaacgcccgtaaagccaacgaagttacagggcttggtaaggtggtcaaaactgccgagaccatcaataaagaacaagtgctaaacattcgagacttaacacgctatgaccctggcattgctgtggttgagcaaggtcgtggggcaagctcaggctattctattcgtggtatggataaaaatcgtgtggcggtattggttgatggcatcaatcaagcccagcactatgccctacaaggccctgtggcaggcaaaaattatgccgcaggtggggcaatcaacgaaatagaatacgaaaatgtccgctccgttgagattagtaaaggtgcaaattcaagtgaatacggctctggggcattatctggctctgtggcatttgttaccaaaaccgccgatgacatcatcaaagatggtaaagattggggcgtgcagaccaaaaccgcctatgccagtaaaaataacgcatgggttaattctgtggcagcagcaggcaaggcaggttcttttagcggtcttatcatctacaccgaccgccgtggtcaagaatacaaggcacatgatgatgcctatcagggcagccaaagttttgatagagcggtggcaaccactgacccaaataacccaaaatttttaatagcaaatgaatgtgccaatggtaattatgaggcgtgtgctgctggcggtcaaaccaaactccaagctaagccaaccaatgtgcgtgataaggtcaatgtcaaagattatacaggtcctaaccgccttatcccaaacccactcacccaagacagcaaatccttactgcttcgcccaggttatcagctaaacgataagcactatgtcggtggtgtgtatgaaatcaccaaacaaaactacgccatgcaagataaaaccgtgcctgcttatctgacggttcatgacattgaaaaatcaaggctcagcaaccatggccaagccaatggctattatcaaggcaataaccttggtgaacgcattcgtgatgccattggggcaaattcaggttatggcatcaactatgctcatggcgtattttatgacgaaaaacaccaaaaagaccgcctagggcttgaatatgtttatgacagcaaaggtgaaaataaatggtttgatgatgtgcgtgtgtcttatgacaagcaagacattacgctacgtagccagctgaccaacacgcactgttcaacctatccgcacattgacaaaaattgtacgcctgatgtcaataaacctttttcggtaaaagaggtggataacaatgcctacaaagaacagcacaatttaatcaaagccgtctttaacaaaaaaatggcattgggcaatacgcatcatcacatcaatctgcaagttggctatgataaattcaattcaagcctgagccgtgaagattatcgtttggcaacccatcaatcttatcaaaaacttgattacaccccaccaagtaaccctttgccagataagtttaagcccattttaggttcaaacaacaaacccatttgccttgatgcttatggttatggtcatgaccatccacaggcttgtaacgccaaaaacagcacttatcaaaattttgccatcaaaaaaggcatagagcaatacaaccaaaaaaccaataccgataagattgattatcaagccatcattgaccaatatgataagaaaaaccccaacagcaccctaaaaccctttgagaaaatcaaacaaagtttggggcaagaaaaatacgacgagatagacagactgggctttaatgcttataaagatttacgcaacgaatgggcgggttggactaatgacaacagccaacaaaacgccaataaaggcacggataatatctatcagccaaatcaagcaactgtggtcaaagatgacaaatgtaaatatagcgagaccaacagctatgctgattgctcaaccactcgccacatcagtggtgataattatttcatcgctttaaaagacaacatgaccatcaataaatatgttgatttggggctgggtgctcgctatgacagaatcaaacacaaatctgatgtgcctttggtagacaacagtgccagcaaccagctgtcttggaattttggcgtggtcgtcaagcccaccaattggctggacatcgcttatagaagctcgcaaggctttcgcatgccaagtttttctgaaatgtatggcgaacgctttggcgtaaccatcggtaaaggcacgcaacatggctgtaagggtctttattacatttgtcagcagactgtccatcaaaccaagctaaaacctgaaaaatcctttaaccaagaaatcggagcgactttacataaccacttaggcagtcttgaggttagttattttaaaaatcgctataccgatttgattgttggtaaaagtgaagagattagaaccctaacccaaggtgataatgcaggcaaacagcgtggtaaaggtgatttgggctttcataatggacaagatgctgatttgacaggcattaacattcttggcagacttgacctaaacgctgtcaatagtcgccttccctatggattatactcaacactggcttataacaaagttgatgttaaaggaaaaaccttaaacccaactttggcaggaacaaacatactgtttgatgccattcagccatctcgttatgtggtggggcttggctatgatgccccaagccaaaaatggggagcaaacgccatatttacccattctgatgccaaaaatccaagcgagcttttggcagataagaacttaggtaatggcaacattcaaacaaaacaagccaccaaagcaaaatccacgccgtggcaaacacttgatttgtcaggttatgtaaacataaaagataattttaccttgcgtgctggcgtgtacaatgtatttaatacctattacaccacttgggaggctttacgccaaacagcagaaggggcggtcaatcagcatacaggactgagccaagataagcattatggtcgctatgccgctcctggacgcaattaccaattggcacttgaaatgaagttt

SEQ ID NO: 176 - DNA, 1674 bp, Moraxella catarrhalis
atgacaaagccacgcttacgatcacatatctttgccatcagttttggtatatttgctagcctaactatgctctctgcttgcggtaaacccagcaaaattcatacaccatccataacgcaccaaaatatgttacctagcaacaccttggcacaattatccgccctgccccagcttacccaaggtttgggcgacacaggcaaaagcgtcattgacccaaataagccaactttggtgaagttttgggcaagctggtgccctttgtgtttagccaccttacaagaaacgcatgattggcgtgatgaccctaatttggcaggctttaacatcattaccgttgccagccccactcacttaaacgaaaaaaatacccaagattttaccgactggtatcaagtgctacaagcagattatccaaatctgcccgtgctcattgacagtagcggccaactcattaaagaacttggtgtacaggtctaccccagctgggcaatcttggacaaaaatgggcaacttgtgtatcttaataaaggcaatcttagctttgagcaagtgtcttatttggcaaaaaatccacaagagctagaccagcttaaaacccaaggtggtcagaccgccatgcccactaaaaataaagatggtgtatattataacgatcaaggccagcctttaaataccaaaaccatccatctggcgggcggctgtttttggggtgtagaagcttactttgagcgtatcgatggcgtggtagatgctgtcagtggttatgccaatggcaatgaaacaatcgccaatccaagctatgagcaagtcattgcaggctcaggacacgccgagaccgtcaaagtagtttatgatgccgataaggtggatttggacactctattacaatattattttaggattgttgacccaaccagcgtcaataaacaaggtcatgaccgtggcatacagtatcgcacaggcgtttattataccgatccaagcgacaaagcgattattgagaatgctttaaatgaattacaacaaaaatataaagcacccatcgtcgtcgaaaatctacctctaaggcatttttcccctgctgaagagtatcaccaagattatctcaccaaaaacccaaatggctactgtcatgtggatttaagtcttgccaatgataaaatcacgagtaaagctcccaccctaccaaaggcaagcaccgttcaagaggcccttgacccaagacgctaccaagcttttactaaagataatttaaaacaaagcttaaccaaggctcaatatgatatcacccaaaacgcaggcacggagcgggcatttagccatgcctacgaccatctgtttgatgatgggctgtatgtagacattgtcagcggtgagccactgtttttatctaccgataaatacaactcaggctgtggctggccaagctttaccaagccgattgatccacaagtcatcagcgagcataccgacacaagctataatatgatacgcaccgaggtacgctcacgcattgccaattcacatttggggcatgtgttccctgatggtccaaaggcacggggcggactgcgttactgcatcaatggcgatgcattaaaattcatccccaaagcggacatggaaaaacaaggctacggggcgttattgccactcattaagcctgcccaacct

SEQ ID NO: 177 - DNA, 909 bp, Moraxella catarrhalis
atgcaaacttcaaaaacccatgtaaatgccctaactttagcgacatttggcatgcttagcggtagtgcatttgcccaaaactctatctcggtttatattgcacctcaaggttctgcccatgcgactgtggcatcagcttatacttcatcaagcagcaaaaacgctgtagagcctggttttttgactaagctgcaaaccgataccatcaattcacaaaaattcaccaaattaagtaacgagtctcaaacggttggccgtttgtatcattataatgagcctacgaccaatttttctgcaaattttgttgcaaacagttatgcaagctactcaggtgattattctgagcgtagtacatacgaccatctcattcgagaatctgcggcaagacatggcgtagatcccgccttaattaaggcggtcatccataccgaatcaagctttaaccccaatgtgcgttcacgcatgggcgccatgggtcttatgcagctgatgccaggtacggctcgtgatatgggtgtatataatgcatgggatcctgcccaaaacatcgaaggcggtaccaagtatttggcgtatttacaacaccaatttagcaatccaaatcatgtgattgccgcttataatgcaggccctggtaatgtcaaaaaatatggcggtattcctccatttcgtgaaaccaaaaattatgtgattaaggtaaatgaccgctacaacaacatttatcgtatggatgcggcattgtatcaaggctatgatgcgaatcgtaccatgcttgcgatgaatagcacgccagtagctcaggtaaagacaacaacaacttcctacgctcagccaatcacacaaagggcaccaagcaatcctgtgattaatcgtgacgcatctgcacatatttatttttcaaacaatgaa

SEQ ID NO: 178 - DNA, 222 bp, Moraxella catarrhalis
gtgccttcctcgatgcgtttggcaatgccaatttcgccttcacgggtcagcaaatccaccgtacccatctcacgcatatacatacgcacagggtcggtagtgcgtccaggctcagtttcaacagaggctagtactgctgctgcttcatcggttgcgatgtcatcatcgctaccagtgtctgataataaaatatcatcatcatctggtgctacctcaaagact

SEQ ID NO: 179 - DNA, 2388 bp, Moraxella catarrhalis
gtgtcaaaatccgtaccacgctctttttggcgtcatcagtcagggctgattgtgacagggattttattgattgtcttgtttgttatgatggtggcatttgtgctgtacgccatgcatctaaataccgccgttgtcggtaaatttgaaaatcgcaaatgggatattcctgccaccttatactcacgccctttggtactgcatcaaggtgccgctttatccgccaaagaccttgaatcatggctaaaactgctcagatatagccatgatgacaccagccaaacgggtcgctaccaaaaaaatggccaagtctataccatttatacacgaggttttcattatggtgatgccgacaaagacccaaagcagctcatcgaagttcattttgatcgcaataccatcaaaagcctaaaaagctccgccccaaataacagcggtatactacgcctagaacccatcaaaatcggtagcatctatcctgataatctagaagaccgcctactcatcacacaagaacaaatcccaaaaccgctcgttgatgccttgattgccaccgaagaccgcaatttttatcagcatcatggcatatcaatgcgtggggttgctcgtgcgttattcaccaatctgacaggtggacaggtgcaacaaggcggttcaaccatcacccaacaattgattaaaaacttttatctggattctgaacgcaccttaaaacgcaaaatcaatgaagctttgatggcggttttattagaaacccattatagcaaagatgaaattttattggcttatatgaatgagattaatttgggtcaaaatggcaagcagtcggtgaatggctttgggattgctgcccagttttattttgataagccgcttggtgagctgtctttggagcagtatgcgttattggtgggtttggcaaaagggcctagccactacaatcctcgcaaaaaccccgagcgagcattacaacgccgaaataccgtattaaatagcatgctggcaacaggtaaaattgatacggccacgcaccaagatgccatcaatcgcccactgggtgtggtaaaaacgcctgccatcgctcgcttgcagttccctgatttttttgatgccgtgcaacgagagctaaaaacccactaccgctcagaagacctgaaaaatcgtggtctgcgtatcatctcaacactagacccactcgcccagcaagccgccgataccgccatgacaaatcagcttggcaaactaagaaaaaaaggcggccgcactcaaaagctacaaggtgcgttggtcagtgctcaccctgccacaggggagctggttgctttggtggggtcaggcagtgattttactgggtttaatcgtgccatcgatgccaaacggcaggttggttctttattaaagcctgtgatttatctgactgcctttcaatcaggtcaatacaatctcaccacacccgtcaatgacacccaaaccagctataccgtcaatggtcgctcatggacacccaaaaattatggcggtcaatctcatggcagcgtaccactactgaccgcacttgccaagtcatacaaccaagcagcggttaatgtcggtatgcagcttggtttggatgcgtttaaggcacagctgggcaatttatctatcaccaccgatattccgccctatccatctgccatgctgggtgcgattgatttatcgcccatgcagatgctgggcatgtatcagatttttgccaatggcggtgcttatacgcccattcataccatccgtaccgtgatcgatgataacgggcgtgtactacaacgatcccaaccacgccatcagtttcgtgcaccaccgcaagcggtttatctgctgaaccgtggacttcaagaggtcatcaaatcaggcactgccaaagctgccgatagtatcaataaccatctgggattggcaggtaaaacaggcacaaccaacgataatcgtgatgcgtggtttgcagggtatagcggtaactatgtcagtgtggtttgggtgggccgtgatgataatcagcccatcggcttaacagggggttctggtgcattgcccatttggatggattatatgaaacgcctgaatttaacggcggtcaatctgcccctacctactggcgtgacttggcagtggatggatggcagattgggattgccgaccatggagagctgccctgatgccagatggctgcctgtgattgatttataccgcccaagccaaatgagtccttgtgccagtgccattttataccaagagcagatctatcggcagatgcttgaatatggctcacaaggcatcgcagacacaggagatgtgtatatcgaagatgcacccatttatgatgagcctgccgaagatggcgataatccttggtgg

SEQ ID NO: 180 - DNA, 2820 bp, Moraxella catarrhalis
atgcctaaatataagctgttatcagccagcatcgctttttcattattgatgagccatcaagcttatgctcatgatgaagcatttgataaactgtctacaaagatagctggccaaagtcagagctggtatcaacatcttgatgcccaggttgttacaccttttcccaaaaagggcactttagaagcagaagttgatcgtaaaatttcttgggatatgcaaaacaatacaacagcagaaaggctcgcccttgcagaagaggataaaaatcaaagctttgctcatgttagtcatgaatttagaaaatctgccttaaaggagtttgctccgcatataactgatgaacagtttgtaaatatctttaaaaatttagaatatttatcagccaatgctatctatagcgatgattttaatgtaggcagaatgagagcttatgattttattttaaaagacaaatatctgcgtggccgcccttatcaagttatggatagggaaggcaagtatattgagggttatgaaaatctcaaaacctatattgatagccaaggcagagaaagaaaaaattcatcttatccaagtgggcatacctccaatggttttggtcaagcggttgtgatggcgatggcatttcctgagcgaggtcaagaggtattctctcgtgcattgcagtatggagaaagccgagtcattgtgggtgcacattttccaacagataccatgacttctcgactcgcacgctattattatatggcacagttgttaaatgacgatgagattgctcaaggattggttaggtatattaaacaagccagacagccatttgaagaaagctgtcagaatgcaccattaaaaagttgtctggagatgcttcctcaagatttgcacgaacaatacaaagcttctgattatcacattggatattatggcacattaaaaagtgatgaaaaagcaagtcgtttagaaccagaggaaatgcctggtacagctgaggctttattaaggttgcgttttaattatttggatggcgatgcacgacgtcaagtattggcttctaccgcttatcccaaaaattcccatgctcacatgggtgatttggataataaaaatcacacatggggcctgatcaatttgccgaaagcttatgatggtatttctcatatttatcaggatatagagacaacgactcaggataagcatttggattttgcaggattttctttggaagatacctggaaaaatgacatctcaggtactggtagactgattttaaatcatccaggcgaattaaccttatctggcaataatacttttgctggtgcaaccgttaagcaaggccaccttaaatttacgggcaataacgcattggctgatgatagttatatcaatcaaggaacaatgagcgttacagggcaattccaatcaaaagtggtgctaaaccatgacgctaagatgatgattgttggtcaaagtgatcaaccaaccactgttcaagagattgaactgtctgccaaagacagctggatttatgttgccccaaagggtgtttttcaagtcaatgcaaattcccaagaaaataacaccaccaccgattctcaaatcagtattcaaacattgtccggtgtaggtcatgtgatggttgaagaccattctaatttacatattgataagttatctggtgagacgatatttgccatcaatccaagcgatgcacctgtcaagataaatgagctaaaaggcaggcatggtgttggtatcccaagccatatatcaaaagataaaaatcatcaaagcttattgaaagtcgataacaatcaaggcagtttttatttgattgacacaaataacaatgttgttgatgcagctgagcaaggagcatatgcttatcaattagtaatgcgaccaaataacactttgcagcttagccaatttgccaatgacaatagccctattgcatcatcaatgactaagaccgccttaaataccggcatgggaagcttgtatacattaagtagccaaatgaatcatttaggctcgatgaataacagacaaagtgtttggctaaatcatcgttaccaagaaaataatattaaaagtcacaatacccagtttgatttaaagcttaatcaaacgacattgggagcaggttctcaagttgggcaaacatatcttggggcctatattaacaaaagtgaaggtgatgttgatcatgtttttggtggtaaaaatgatcttgatgcaacaggctttggtgtttatcttaatcgcttattaccaaatcaacaagagatcttcctccaaggcgcgtggcaaaatgtcagacaaaaaatacatgctaaacaagccaatcatgataatttaacagcaagtataaaggataatacctgggcgattgcgttgggtgctcagcagcagatgaaattccacaatgtggatttccaaccttcttttgaaattagccatattcaaaccaatccaaaatcgtttagatatgatcagatgcctaatttgcaaattaatccaaaaaaggcatctatgaccacggtaaatatcggtacaaaaatttccaagaattatgggttgttgcaaccttatttaaaagccaaaatgttctatcaagataccaagcaagatttgaacattattgatatgaataatgaagtatcttggtggtcaacggatttatcgggctttggtttcgcaggtgctttgggcgtgacaagtcaaatcaactctaggttctttatttcaggagaggcgtctgctcaatatcaagaggaggtaaaaacaccaattgaagcaaagctgtcgcttaactaccaattc

SEQ ID NO: 181 - DNA, 6435 bp, Moraxella catarrhalis
atgaatcacatctataaagtcatctttaacaaagccacaggcacatttatggccgtggcggaatatgccaaatcccacagcacgggggggggtagctgtgctacagggcaagttggcagtgcatgcactctgagctttgcccgtattgccgcgctcgctgtcctcgtgatcggtgcaacgctcaatggcagtgcttatgctcaacaagccaagatcgaaattcatccagacgacaagtcgtcgaatgcccaggcgacaggtgacgcatccattgctattggtagtctttctcaggcaaaaggctctcaatctattgctatcggtggtaccaaaccagataagcaagcaggtcggacgcagaatcatgtaggtgccctcgccaaaggtagagagtccattgccatcggtggtgatgtattggctgggggtcatgcctcgattgccatcggtagtgatgacttatatttgaatgaaccatcaatagcaaaccaggatgccattcaaaatgctattaacaactatcaagaattaaaggacataaaactatcaactgatcctaaagtacaatataaatacacacacgcacagggacacgccagtactgcagtgggaaccatggcacaggcactgggtcatttttccaacgcttttggtacacgggcattagctcaaaacaactattccttggcagtgggtcttctctccaaagcccgacagggatatgcaatcgctattggttctagtgcagaagctaaccagtatagagcactagcccttggtgcagatactcaagttgatttgaggaacggcattgccataggttatggctctcaggtcactgataatgatgctactaataataatacaaatgcctatataccaggagatggtgagttccaaataaacccgatacatacagccaccttaaatgcgggtctattttccattggtaatagaagtaccaagcgtaaaatcatcaatgtcggtgcaggttcggaggataccgatgcggtcaatgtggcacagcttaaattggtggagaaggtggctaagcgtaaaattacttttaagggtgatggtaacggtcctggcgtacaaacaaaactgggcgatactttaaacatcaaaggcggacaaacagatgccgatcaattaaccagcgataacatcggtgtggtggctgatagcagcaagaatagtttaaccgttaaacttgctaaaaacctaagcaatcttgaaaaagttaacaccaaaaacctaatcgccagcgagaaagttaaggtaggtaatggtactggtactaacatcgctgagctacaaagcggtggtttaacctttacccagcccaatataggcggtcaaaactcaggcaaaaccgtctatggcactgatggggtaaagtttgctgataatactaatacaggagcaacaacagcagcagtcgacactactcgtattaccagaaataaaattggctttgctggtaatgctgatcaagttgatgaaagcaaaccttatcttgataaagacaagctaaaagttggcaatgttaagattaccaaaaacggcattgatgcaggtggtaaagaaattaccaatgtcaaatctgccattgctgacgctggaaatggacaagcagattcaacctttatcactcgcttaaggaatgccaatgccaataccaacaaatcaggctctgccgctaccattaaagacttgcatggcttgtcacaagtaccgctgacctttgtaggtgatacaggtacaacggataaaaaactgggcgatactttaaacatcaaaggcggacaaacagatgccgatcaattaaccagcgataaaatcggtgtggtggctgatagcagcaagaatagtttaaccgttaaacttgctaaaaacctaagcaatcttgaaaaagttaacaccaaaaacctaatcgccagcgagaaagttaaggtagtcaataacggcaataccgctgagctattggatagcagtttaacctttaccccaacaggtgtaaacgcagacaaaaccgtctatggcgttgatggcttgaagtttactgataacaatgataaagcacttgacggcacaacttacatcaccaaagataaagttggctttgctaaagctggtggcacacttgatgaaagcaaaccttatcttgacaaggaaaagctaaaagttggtaaaattgagattaaagacagtggcatcaatgcaggtggtaaagccatcacagggctgtcctcaacactgcccaacactaccgatgatactgtacctggcgtgcatactgcactacatggccgtaaaatttctgacgacaacaaaacccgtgccgccagtatcgccgatgtgctaaacgcaggctttaacttggaaggtaatggtgaagcggttgactttgtctccacttatgacaccgtcaactttgccaatggcaatgccaccaccgccacagtaacctatgatgtcactaacaaaaccagtaaagtggcgtatgatgtgaatgtggatggtacaaccattcatctaacaggcactaatggcaagaaaaaccaaattggcgtaaaaaccaccacactgaccacaacaagtgctaaaggtaatacaccaattaactttagtgttaactctggtgatgacaatgcccttgttaacgccaaagacatcgccgacaatctaaacaccctagctggtgaaattcgcaccgccaaaggcacagcaagcaccgccctacaaaccttctctattactgatgaacaaggtaataactttacggttggtaacccttactctagttatgacacctcaaagacctttgagaccgtcacctttgcaggtgaaaatggcatcactatcagcaatgacaaaaccaaaggtaaagttaaagttggtattgaccaaaccaaaggcttaaccacgcctaagctgaccgtgggtaataataatggcaaaggcattgtcattgacagtaaagatggtcaaaataccatcacaggactaagcaacactctagctaatgttaccaatgatggtgcaggacacgcactaagccaagggcttgccaatgacaccgacaaaacccgtgccgccagcattggtgatgtgctaaacgcaggctttaacttgcaaggcaatggtgaagccaaagactttgtctccacttatgacaccgtcaactttatcgatggcaatgccaccaccgctaaggtgacctatgatgacacgaaacagaccagcacagtaacttatgatgtcaatgtggataataaaacccttgaagtgacaggcgataaaaaacttggcgtcaaaaccaccacactgaccaaaacaagtgccaatggtaatgcaaccaaatttagtgccgccgatggcgatgcccttgttaaagccagtgatatcgccacccatctaaataccttggctggcgacatccaaaccgccaaaggagcaagccaagcaagcagctcagcaagctatgtggatgctgatggcaacaaggtcatctatgacagtaccgataagaagtactatcaagtcaatgaaaagggtcaagtggacaaaaccaaagaagtcaccaaagacaaactggtcgcccaagcccaaaccccagatggcacattggctcaaatgaatgtcaaatcagtcattaacaaagaacaagtaaatgatgccaataaaaagcaaggcatcaatgaagacaacgcctttgttaaaggacttgaaaaagccgcttctgataacaaaaccaaaaacgccgcagtaactgtgggtgatttaaatgccgttgcccaaacaccgctgacctttgcaggggatacaggcacaacggctaaaaaactgggcgagactttgaccatcaaaggtgggcaaacagacaccaataagctaaccgataataacatcggtgtggtagcaggtactgatggcttcactgtcaaacttgccaaagacctaaccaatcttaacagcgttaatgcaggtggcaccagaattgatgaaaaaggcatctcttttgtagacgcaaacggtcaagccaaagcaaacacccctgtgctaagtgccaatgggctgaacatgggtggcaaacgcatcagtaacatcggtgcagctgttgatgataacgatgcggtgaactttaagcagtttaatgaagttgccaaaacggtcaacaacctaaacaaccaaagtaactcaggtgcgtcattgccctttgtagtaaccgatgctaatggcaagcccatcaatggcaccgatggcaagccccaaaaagccatcaaaggcgccgatggtaaatactatcacgccaacgccaacggcgtacctgtggacaaagatggcaaccccatcaccgatgcggacaaacttgccaatctggcagttcatggcaaaccccttgatgcaggtcatcaagtggtggcaagcctaggcggcaactcagatgccatcaccctaaccaacatcaagtccactttgccacaaattgccacaccaagcacaggtaatgccaatgcagggcaagcccaaagtctgcccagcctatcagcagcacagcaaagtaatgctgccagtgtcaaagatgtgctaaatgtaggctttaacttgcagaccaatcacaatcaagtggactttgtcaaagcctatgataccgtcaactttgtcaatggtacaggtgccgacatcacaagcgtgcgtagtgctgatggcacgatgagtaacatcaccgtcaacaccgccttagcagcgaccgatgatgatggcaatgtgcttatcaaagccaaagatggtaagttctacaaagcagacgacctcatgccaaacggctcactaaaagcaggcaaatcagccagtgatgccaaaactccaactggtctaagccttgttaaccccaatgctggtaaaggcagtacaggcgatgcagtggctcttaataacttatcaaaagcggtatttaaatccaaagatggtacaactactaccacagtaagctctgatggcatcagtatccaaggcaaagataacagcagcatcaccctaagcaaagatgggctgaatgtaggcggtaaggtcatcagcaatgtgggtaaaggcacaaaagacaccgacgctgccaatgtacaacagttaaacgaagtacgcaacttgttgggtcttggtaatgctggtaatgataacgctgacggcaatcaggtaaacattgccgacatcaaaaaagacccaaattcaggttcatcatctaaccgcactgtcatcaaagcaggcacggtacttggcggtaaaggtaataacgataccgaaaaacttgccactggtggtgtacaagtgggcgtggataaagacggcaacgctaacggcgatttaagcaatgtttgggtcaaaacccaaaaagatggcagcaaaaaagccctgctcgccacttataacgccgcaggtcagaccaactatttgaccaacaaccccgcagaagccattgacagaataaatgaacaaggtatccgcttcttccatgtcaacgatggcaatcaagagcctgtggtacaagggcgtaacggcattgactcaagtgcctcaggcaagcactcagtggcgataggtttccaggccaaggcagatggtgaagccgccgttgccataggcagacaaacccaagcaggcaaccaatccatcgccatcggtgataacgcacaagccacgggcgatcaatccatcgccatcggtacaggcaatgtggtagcaggtaagcactctggtgccatcggcgacccaagcactgttaaggctgataacagttacagtgtgggtaataacaaccagtttaccgatgccactcaaaccgatgtctttggtgtgggcaataacatcaccgtaaccgaaagtaactcggttgccctaggttcaaactctgccatcagtgcaggcacacacgcaggcacacaagccaaaaaatctgacggcacagcaggtacaaccaccacagcaggtgccacaggtacggttaaaggctttgctggacaaacggcggttggtgcggtctccgtgggtgcctcaggtgctgaacgccgtatccaaaatgtggcagcaggtgaggtcagtgccaccagcaccgatgcggtcaatggtagccagttgtacaaagccacccaaagcattgccaacgcaaccaatgagcttgaccatcgtatccaccaaaacgaaaataaggccaatgcagggatttcatcagcgatggcgatggcgtccatgccacaagcctacattcctggcagatccatggttaccgggggtattgccacccacaacggtcaaggtgcggtggcagtgggactgtcgaagctgtcggataatggtcaatgggtatttaaaatcaatggttcagccgatacccaaggccatgtaggggcggcagttggtgcaggttttcacttt

SEQ ID NO: 182 - DNA, 1857 bp, Moraxella catarrhalis
atgtctttattacaaatcagcgaacctaatcaaagcaaaaacccccatcagcatcgttatgcccttggtattgatttgggtacaacacattccttggttgccgttgtcagatcaggacgctccgaagtgcttgcttttggtcagtcgccactgttgccatcggttgtttattatggtaaaaaaagcagccgccctatcgtcggtaatgatgccttaaactatgccgatgaccataaaaacaccatcatctccgccaaaagattcatggggcgtgccaaatcagacattaaattttctcatccttatgatttgtctggcaatcatcaaaccatgcctgcttttttaaccgctcaaggtgaaaaaagccctgtagaaacttctgcacatattttaagacatctaaaaaatcatgccgccgctgccttaccaccagacagtattcaaggtgcggtgattaccgtacctgcctattttgatgacgctcagcgggccgccaccaaagatgcagcgaccgcagcaggcttaaatgtacttcgcctactcaatgagccaactgcagcagcaattgcctatggcatcgataaaaataccgctcaaggaaattatttggtctatgatcttgggggcggtacttttgatgtctcattgcttcgcttatctgagggtgtctttgaggtacttgccacagggggtaattctgcccttggtggcgatgacattgaccgactgattgcacattggttaatacaatcatctcacctgaccccagcagatattgatgagactgaaaaatctcgcttagcaaaacttgccaaaacctataaacaagcattaagtagtcaagacagtgttgttattgaagttgagattggtggtattttagtcacgcaaacactaaataatgacatgttaagtgagattatacaacctgttatccgtcgtaccattcaatcttgtgaacaggtcatgcgtgatgccaaaattgacaaatccaatctcaatgacatcattttggtgggcggctcaacacgcatgccagtcattcaaaatgccgttacagcatattttgagcgtacgccgttatgcaatattaatcctgatgaggttgttgctatcggtgctggcattgctgctgatcaactgattaatcaatcaaacgaaacgctacttcttttagatgtgacgcctttatcgcttgggattgaaacaatgggtggattggtggaggttatcattccacgcaatacccccattccagtgactcgccgtcaagtttttaccacacatcaagacggacaaactggtatgattatccaagtggtgcaaggtgagcgtgatacggttgccaattgccgaggattggcacgctttgagctacatggcattccaccgatgaaagcaggtttggcacgcattgaggtaacttatgccatcgatgccaatggtcagttgacggtatccgctcgtgaaacaacgacagacatcatcagtcaaattcaagtcagtccaagctatggtttatccgaagagcaacaagagcagctcttgcaggcgggttttattcatgctgctgaagataaagctgctcgcatgctcatcgaaactaaagttgaagcccaaagggaattacttgccttacagtcagctttggatgaatttaccgatttacttagcgatgaagaacagacaaatttacgccatcatatgcaagtgacggcaaattcactaaatacagatgacaaggccgccattgacgaagccatcaaagccttaaaggtacacagtgaccattttgccagtgttattatggataaaaatgtcaaagacgcccttactggtacacgcaccagcgactgg

SEQ ID NO: 183 - DNA, 2679 bp, Moraxella catarrhalis
atgaaaaccatgcaatcaaatgaagtacgccaagcctttattgacttttttgtctcaaaacagcatacccatgttccctcatcaagtctcattccgcacaatgaccccacgctgctgtttaccaatgcaggcatgaatcagtttaaagacacttttttggggttagaaaaacgcgactatgtgcgtgctgtgtcatcacaaaagtgcgtgcgtgctggcggtaagcataatgaccttgataatgtgggctacaccgctcgccatcatactttttttgagatgctgggcaattttagttttggtgattattttaaaaaggacgccattgcctttgcgtgggaatttttaaccgatgaaaaatggcttgccttgccaaaagaccgtctttatgtgactgtttatcacaccgatgatgaagcctttgacatttggcacaaagacatcggtctgccccaagagcgtatcattgccattggcgataataaaggcggggcgtaccagtccgataacttttggatgatgggggatacaggcccttgcggcccttgcacagagattttttatgaccatggtgagcatatttggggtggtctgcccggtacgcctgacgaagatggcgaccgctatattgagatttggaactgtgtctttatgcagtttaaccgccaaaaagatggcacaatgcagccgctgcccaagccgtcggttgatacaggcatggggcttgaacgcatcagtgccatcatgcaaggggtgcatggcaattatgagaccgatatttttaccaagctgatgacaaaggcggtcaacatcattggcttaccaaccgataccgacattcaaaatgagccatctttgaaggtgcttgctgaccacattcgttcggtggcgtttttgattgctgatggggttatcccaagcaatgaaggtcgtggctatgtgttgcgtcgcatcattcgccgtgcggtgcgtcatggcaacaaacttggggcaaccgatgcgttcttttatcagctggttcacccacttgctgacatcatgggcgatgcctacccccaactgcgtcatgaacagcacaaaattgaacaagcgattttaaaagaagaagaacaatttgccaaaacattatcgcaagggctaaaactgctgtcgcaagaattggacagcttacagcaaggcgatgccttagcgggtgaaacggtgtttaaattatatgacacctatggctttcctgcggatttgaccgctgatatcgtgcgtgaaaaaggcatcaccattgatgaggcgggctttgagctgagcatggcagagcaacgcacaagggcgcgtgaagcaggcaaatttgccatggattatcacgcactcattcaagtagacagtgccaccgaatttttaggctatgaacggcttgataatgacagcaccgtgattcatctttatcaagatggcaaggctgttgatacactggcagaaggtgatgagggtgtgttaatccttgataaaaccccattttatgccgaaagtggcggacaggtgggtgagcttggcgaaatcagcaccgaatctggcgtatttgatgtgttagacacccaaaaatcaggacaagccatcattcatcatggggtggtgaaaatggggcatattaacaacaatcagtcagcgaccgcccaagtggcaagtcaggtgcgtgcgtccagtgccaaaaaccactccgccactcatttgctacacgccgctttacgcaccatattgggcgatggggttagccaaaaaggctcaatggtgagcggcgatttgcttcgttttgatttttcatatgacaaaccattgaccgaacaaaacatcaaccaaattgaaaccatggtaaaccaacaaatcttagccaacacccctgcccatgttgagattttggacattgacagtgccaaaaacaaaggggcgatgatgctctttggcgaaaaatacggcgatacggtgcgtgtgctgtccatgggtacaaccgataaagatggcaaaccattttccattgagctgtgtggcggtctgcatgtgactcgtacaggagatattggactgtttaaaatcataagcgaacaaggcatttcagcaggtgttcgccgtatagaagccgttactggcatgggagcggttcactatgtgcaacaaggcgataagcaattaaaccaacttgccaatcagtttaaagccaaacgccatgaaatcgcccagcgtgtggcacaattgagcgacaaaaaccgtcatctggaaaaacaaattgaacggctaaaccaaaaatttgccagcctacacgccaattcattgatggacaacctaaaaaatatccatggtcaaaaagtgctgattgccaccgtcaatggcatggataataaagcattacgcaccttatcagacgacatgaagtcaaaactggccgatggcattgtgatactggcaagcgtctatacggcagacggtgaagacaaaatcaccatgaccgcaagcgtgggcaaacacttaacaagcaaaatcaaggcaggcgacatcatcaagcacctaagcgaaaacttaggcggcaaaggtggcggcaaaccagactttgcccaagggggtgcaaccgatgtggcgaacctgccaaagctgatgactggcttgacagattggattggggagaaattgggt

SEQ ID NO: 184 - DNA, 1059 bp, Moraxella catarrhalis
atggcaacttttcgcaaaatcctaaaccccatcagcctaaaaaaccttgaactcaaaaaccgcattgtcatgcccccaatgtgccaatattctgctacggatggtgtgccaaatgactggcatttgctccattacaccagccgagcggtgggcggtgtgggcttgatcatcgttgagatgaccaatgtcgctgccaatggtcgcattacggcgaactgtttggggctttggaatgatgagcaagaacaagcgtttaaaaaattggtggacagcgtgcatgcacaaggggcgaaaattggcattcaaatcgctcatgcaggtcgtaaagcccaagatgagccaaatgccgttgccccaagtgccattcattatggtgagcttgactatgctgggcaaaatctcatcaccccaaggcagctgagcattgacgagataaaagcattggtacaagcatttgccgactctgtcaaaagagcggtgaatgcaggctttgatgcaattgagcttcacgccgcccacggctatttgattcaccagttttgtgcacccaaatccaaccaacgaagcgatgaatacggacaagaccgcctattgtttggcgagcaagtcattcacgccgttcgtgccgtcatgcctgatgagatgcccctaatcgtgcgtatctctgcccaagagtatggcgaaaacggctttgacagtgattatggcgtggagattgccaaacgcttctcaacagctggggcagatgtgtttcatgtcagcggcggcggcgatggcgtattgtgtgagggcaagcacccccaattttatgcaggctatcaggtaccactggctcgcaaagtcaaacacgccacaggcaaacctgtgattgctgtgggcatgctagatgaccctgccgtggctgaccatgtgcttggcatgggcgatgccgatcttgtggcgataggtcgtgggctgcttcgagacccatattgggtgctaaacgcccagtatcagcaaaaccgctcagatggcaaagaggtgcagtttgtgcccagacaatatgagcgtgggtttatg

SEQ ID NO: 185 - DNA, 1077 bp, Moraxella catarrhalis
gtggttaaggtaatgcaaaaaatgcacgctcatactcaagcgatacagcgatgggtgatggcgattttactaccaattttattaatttttggtgagaccgcttgggcttctgagtctgtatctgaagatgatttgacagcactgattatcagtgctaatcgtgcgtcccaaagtaatccaaattcaccactggcagaatctgtgcgtgaatttgagcaggctattaatcccgccaatcaagcagataccaaacctcaatcaacccccatcaatataccaacatctcacgcacaaagtatcagccatgacaagctgattttaaatacacctgtggttgatgttgccaaaatattgacaccatcagaatatctacacttaaccgaacagctccataagatttatcaagataatttggctcaagctgctttggtgattgttccaagtactgatggtatcgatatttttgattatgcacttgccgtcgctgagcgatggcagttaggtcaagcagatacagatgatggtttattaattactgttgcggtgaatgaccgaaagatatatatcctaacaggttatggacttgagggtgtgctgcctgatgcagcattaagtcgtattattcgtgatgatatcacacctgcttttaaatcaggcaattatgctcaagggctgtcagcagggattgcacgcattgatgaacgcctaagagctgatcctgaaagtttggctcgtgctgacgctcagactgatgattctgtggatatagacatcattggcttatttatcattgcgttgattgcaggttcttttttgggggcgattcttggtagatttttgggtgcaacctttggtgcaggtggatttgttattgtggcactgatgagtggtgctggattttttgtggtaatgatcgctgcagtcatattatgggtatttttattggctcgtggtgttttaccgatcacaggtggtagcggtaactttggtagcggtgggcgaagtggcggttttggtagcggtggctttggtggcggtggcggcagcttcggtggtggcggtgcaggaggttcttgg

SEQ ID NO: 186 - DNA, 2439 bp, Moraxella catarrhalis
atgcgtaattcatattttaaaggttttcaggtcagtgcaatgacaatggctgtcatgatggtaatgtcaactcatgcacaagcggcggattttatggcaaatgacattgccatcacaggactacagcgagtgaccattgaaagcttacaaagcgtgctgccgtttcgcttgggtcaagtggtgagcgaagcacagttggctgatggtgtcaaagcactttatgcaacaggcaatttttcagatgtgcaagtctatcatcaagaagggcgtatcatctatcaggtaaccgaaaggccgttaatcgctgagattaattttgagggcaatcgcttaattccaaaagaaggtctacaagaagggctaaaaaatgctggcttagctgtgggtcaaccactaaaacaagccacagtacagatgattgaaaccgagcttaccaatcaatatatatcacaaggctattataataccgaaattactgtcaaacagacgatgcttgatggtaatcgtgttaagcttgatatgacctttgctgaaggtaaacctgcacgggtggttgatattaatatcattggcaatcagcattttagcgatgcagatttgattgatgtgcttgcgattaaggataataaaatcaatccactgtctaaagctgaccgttatactcaagaaaagctggtgaccagtttagagaatttgcgtgctaaatatctcaatgcagggtttgtgcgttttgagattaaagatgctaagcttaatattaatgaagataaaaaccgtatctttgttgagatttcattgcatgaaggtgagcaatatcgctttggacagacacagtttttgggtaatttaacttatactcaagcagaacttgaggcactgcttaaattcaaagcagaagaagggttttcacaagccatgcttgagcaaacaacaaacaatatcagtaccaaatttggtgacgatggctattattatgctcaaatccgtcctgtaacacgcattaatgatgaaagtcgtacggttgatgtggaatattatattgaccctgtacaccctgtctatgtacgccgtattaattttacaggtaactttaagacccaagatgaagtactccgtcgtgagatgcgacaacttgaaggtgcgttggcatctaatcaaaaaatccagctgtctcgtgcacgcttgatgcggactgggttttttaaacatgttaccgttgatactcgtccagtacccaactcacctgatcaggttgatgtaaattttgtggttgaagaacaaccttcaggatcatcaaccatcgcagcaggctactctcaaagtggtggtgtaacttttcaatttgatgtttctcaaaataactttatgggtacaggtaagcacgtcaatgcttcgttttctcgctctgagacccgtgaggtgtatagtttgggtatgaccaacccatactttaccgtaaatggcgtctcgcaaagcttgagtggctactatcgtaaaaccaagtatgataacaagaacattagtaattatgtacttgattcttatggtggctcattaagctatggatatccaattgatgaaaatcaacgcataagctttggtctgaatgctgacaataccaagcttcatggcggtcgttttatgggcattagtaatgtcaagcagctgatggcagatggtggcaaaattcaagtggataataatggcattcctgattttaagcatgattacacaacctacaatgccattttggggtggaattattcaagtctagatcgccctgtatttccaacccaaggcatgagtcattctgtagatttgacggttggttttggtgataaaactcatcaaaaagtggtttatcaaggcaatatctatcgcccatttatcaaaaaatcagtcttgcgtggttacgccaagttaggctatggcaataatttaccattttatgaaaatttctatgcaggcggctatggttcggttcgtggctatgatcaatcctctttgggtccacgctcacaagcctatttgacagctcgtcgtggtcaacaaaccacactaggggaggttgttggtggtaatgctttggcaactttcggcagtgagctgattttacctttgccatttaaaggtgattggatagatcaggtgcgtccagtgatattcattgagggcggtcaggtttttgatacaacaggtatggataaacaaaccattgatttaacccaatttaaagacccacaagcaacagctgaacaaaatgcaaaagcagccaatcgcccgctactaacccaagataaacagttgcgttatagtgctggtgttggtgcaacttggtatacgcccattggtcctttatctattagctatgccaagccattgaataaaaaacaaaatgatcagaccgatacggtacagttccagattggtagtgtcttt

SEQ ID NO: 187 - DNA, 723 bp, Moraxella catarrhalis
atgtctgataaaaatccacaattttcacgcattttattaaaactatcgggtgaagcgttggctggcggtcgtgatatgggcattgatgctaatatcttggatcaaatgagcctatccattgcacatcttcgagggctgggtgttcaagttggtattgttgttggtggtggcaatttgtaccgtggtagtacgctacaaaaacaagggttggttggtcgtgtgacaggtgaccaaatgggcatgctcgcaaccgtgatgaatggtttggcgatgcgtgatgctttggtacgccgaaatattaaaactcgcctaatgtcagcgattgccattgatacagtagttgagtcatattctagccgtgatgcgatacgccacttaaataatggcgaggtgtgtatctttgtggcaggtacgggtaatccattttttaccacagataccgcagcgtgcttgcgtggcatcgagattgaagcagggctgattttaaaagccaccaaagttgatggcgtttatgataaagacccaacaaccgatgatgatgcggttaaatttgacagtttgagttttgatgaagtgcttgaaaaaaagcttggtgtgatggatttaacagcgattgcgttatgccgagagcataatgtaccgctacaagtatttgatatgaataaaccaaatgcgctattgaatgtggttatgggtgaggctgaaggtacacgagtttatcac

SEQ ID NO: 188 - DNA, 2016 bp, Moraxella catarrhalis
atgaagcaaattttgttaggaactttgctgatgccaatcgaacttaaccaacgccataacgccaatgctatccgtattcttgcgatggatgccgtccaacaagccaactcaggtcacccaggggcaccgatgggtatggcggatatcgcagaagtgctatggcgagagtttttacgccataatccaaaaaatgccaaatgggtaaaccgtgatcgctttgtgctatctaatggccatggctcaatgttattgtatgctttactgcatttgactggttatgatttaagtattgatgatcttaaaaatttccgtcagctgcattcaaaaaccgcaggtcatcctgaatacggttatgccgatggtatcgagacaaccacaggacctttaggtcaaggtattgctaatgccgttggttttgcgttggctgagaagactttggcagcacagtttaacaaacctgacaatgcaatcattgatcattttacctatgcgtttttgggcgatggttgtttgatggaaggtgttagccatgaagcatgctcactggcgggtactttggggcttggtaaactgattgcttattatgatgataatggcatttcaattgatggcgaggttgaaggttggttttctgatgatactgccaaacgatttgaagcgtatggctggcaggtattaaaaattgatggtcatgatgctgatgccattcgtgatgccaccaatcaagccaaagcagaatcagccaaaccgacattgattatttgcaaaaccattattggtttgggctcgcctaataaacaaggtaaagaaattagccatggcgcacctttgggcttagacgaaattgctttgacacgcacgcaaatgggctgggcggacaccacgccttttataattaccgatgagatgtatcgtgcttgggatgccaccgccaaaggcagtaccgatgaagcagcttggaataaacagtttgctgagtatcaagataaatatcctaaggaagctgctgagcttttacgccgttttagtggtgatttgccagagaactttgatcagctggcagatgaatttatccaaacttgcgtccaaaaagcagaaagtatcgccacacgcaaagccagccaaaacgccatcgcagcacttgcaccacacttacctgaaatcttgggcggttcagctgaccttgcaggttcaaacctaactttgtggtcaggtgctaaaggtgttcaagagtacgccgatggtaattatgttcattatggtgtgcgtgaatttggcatgacagcaattgccaacggcgtggcactgcatggcggatttatcccctacacagcgacatttttaatgtttatggaatatgctcgtaatgctgtgcgtatgtcatcgctgatgaagcagcgtgtgatcaatgtttatactcacgactcaattggtctgggtgaagatggcccaacgcaccagcctgtcgagcagattgctaatttacgtatgaccccaaatcattatgtatggcgtccttgcgatactgttgagacagcagtggcatggaagatggcgcttaaaacaaaaaccgctccttcatcattgattttatctcgtcagaatttggcatttcaatctcgcagtgatgagcaaattcagaatatcgaaaaaggcggatatattttagcacccgaaaaaggtactcttaaagccatcatcatcgcaacaggttctgaagttgagcttgcgatgcaggcgtatgagcaactagaaggcgtgcgtgtggtttctatgccatgtgctgagatttttgttaagcaggacagtggttatatcgaaagtgtgttaccatctgatgttcgtgtgcgtgttgctgttgaggcggcaatcacggattattggtataaatttgttggcttagatggcaaggttgttggtatgacgacatttggagagtctgcacctgccaaggtattgtttgagcattttggtatcacaacccaagctgtggtggatgcggtaaattctttactt

SEQ ID NO: 189 - DNA, 2925 bp, Moraxella catarrhalis
atgagcatagacaatttatcaaccaattataatccagcaaatattgaacaaaaatggtacaagatttgggaacaacaaggctattttaaaccccaaccaaaccccgccatgagcgacaaacaaaacgctttctctattgccttgccgccgcccaatgtcacaggttcgctccatatggggcatggctttaacaacaccatcatggacacattaacccgctatcatcgcatgatgggtcataacacgctttggcagcccggtaccgaccacgcaggcatcgccacacagatggtggtggagcgtcagcttgggttacaaggcatcagccgtcatgatttggggcgggagaagttcattgacaagatttgggcgtggaaagagcagtcaggtaacaccatcactcgccaaattcgccgtttggggtcgtccgtggactggtctcgtgaacgctttaccatggacgacggtctgtcgcaggcggtcaaagaggtgtttgtgcggctttatgatgagggcttgatttatcgcggcaaacgcttggtaaactgggacccaaaactacacaccgccctttctgacttagaagtagaaagcgtagaagagcaaggcagtttgtggcattttagatatcattttgccgaccaaagtttgacaacccaagacggtaaaaattatctggtggtggcaaccacacgccctgaaaccctgcttggcgacagtgcggtggcggtacaccctgatgatgagcgttatgcccatttgattggtaaaaccatcgtcctgcccattagcgggcgtgaagtgcctatcgtggcggacgattatgtagaaaaagattttggtacagggtgcgtcaaaatcacgccagcccatgactttaacgaccatgagcttggtaaacgccacgaattaccgctcattaatatttttgatgaagatgcgtgcataaaagctgaatttgacttgattgccaaagtgggagagccgatttctaaccatatcaccgcccctgccgactatgcagggcttgagcgttttgccgctcgtaaaaagctcatagaacaagcccaaaacgaaaactggcttgaaaaaattgaaccttataccctaaaagccccccgtggcgaccgctccggtacagtcattgaaccacttttgaccgaccaatggtatgtggcgattgaaacccttgccaaaccagcgattgaagcggtgcaaaatggcgacattcaattcgtgccacaacaatacaccaacatgtacatggcatggatgcgtgatatccaagactggtgcatcagccgtcagctgtggtgggggcatcgtatccctgcatggtatgatgacaatggcaatgtgtatgtggggcgtgatgaaagcgaagtgcgtgccaaatatcacctaggcgatatcccccttcgccaagatgatgatgtgctagatacttggtttagctcggctctgtggacatttagcacgcttgactggacaggtcagaccagctttgatgattatggcgatgccctacaaacctttcacccaacaagcgtactggtaacaggatttgacatcattttcttttgggttgctcgcatgattatgatgaccatgcactttatcaaagacaaagatggcaagccccaagtcccctttaagaccgtttatgtgcatggtctggtcagagacagccaagggcaaaaaatgagcaaatccaaaggcaatgtgcttgaccccattgacttaattgatggcattgatttggaaaatctggtcaacaaacgcacccaagggctgatgaacccaaaagaagcggacaacatcgccaaacaaacccgtcaagaattccctgacggtatcccagcctttggcacagatgccctgcgatttacttacgcatcacttgccagcacaggacgagacattaactttgacttaaaacgcattgaaggatatcgcaatttttgtaataaaatctggaacgccactcgctttgtactcatgaactgcattgacaaagatggcaatccccaaaacattgataaatccgccaaccccaagctttggcagttgcctgaacactggatcatcagccgcctaaacgccaccatcaatgacattcacgagtatatgagccagtaccgttttgacttgatgagccaagccatttatgaatttatttggaatgaatactgcgactggtatgtggagcttgccaaatccagcttaaacgcatcagaacaagacggcacggtcagcgatgagcgaaaagcccaaatccgttatgtactgctctttgtgcttgaaatggcaatgaaaatgacccaccccatcatgccttatctcaccgaagagatttggcaaaccatcacgccactgctgggcaaaacaggcaaaagcatcatgttaagcacctaccccaagtgcgatgacagcaaaatcaacgaacaagccgaaagcgacatggcatggctacaaagccttatcggtgcagtgcgaaacattcgtggcgagatgaaactgggcaatgccgtgcgtctgcctgtgctaattcaaggggcaagcgatgaacaaaaagcaagccttgtacgcattgacaatcaatttaaaacccttgccaaagtagacagcctaacgattgtcaaaactggcgaagaggtgccattatcatcatctggcatggttggacaaatgaaagtgcttgtccccatgaaaggcttgattgacccgaccgctgaactaaaccgcctaaataaagtgcgtgataaactgcaaacccaagcagatgccatcaacaaaaagctgtccaatgacaacttcatcgccaaagcccccgctcaggtggtagaagcagaacgagccaaactctctgagttacaagggcagttagcagaagtggagaagcaggtgggggcgttggggaatttg

SEQ ID NO: 190 - DNA, 1845 bp, Moraxella catarrhalis
atgaagcataccaccaaatttagtgccatatctttgggcatctttatactgccatttgtgatgagtttgccatcttatgctgccaatgtcatcactgataccactcaaatcaagccaaacgctgttagcagacaagatggcttcgttgatacaaaagtcgatcagatgataaatccttatggactaagtgataaagccttacaaagtatcagtcaatcggcagcgtggcggcgactgttattatttcaagatacgcctgttgagcatgataacagcagtattgataatcctaaattttttttggcacaaaatgggtatcacgatgcctatgctgaacttatcgccacattatccgccatgcaaagaggtgatggtgacgccgtatgccgctttgttgcacggacgcactttttaacccaagcgttggcaactcaagatattgatagcggtgttgatgataggcagtgcagcgattttcatgcctttgccgatacactcaatgccaagcgtttgtcgctgatttttgccgaagaacatcccaataatattgcttctgcttttgcgcatgtgctgatgcgtgtcgatgatggacaagatgaagatgaagccgccacggcgattaattacactgtacagcccaacaaagctgatggcgtcctcgtctcaacagccaaatccatcatcggaggttatccggccgtgatggaaattatgccttatcaaaaaaaggcagatgattatttggttaaagacgaacgagatttgtggcaatttagtctgaatttaacacccaaagaagtgacgcagattgtccgtcatatttgggaggttaaagagatgaagcgtccgtatttttttacacatgataattgtgtgaccgaaattgtcagattaattgatgtggttcgtcccgaagggaatatacaagctgatatcggtaatattgccattccctcacgcattgcagcgattttaagtcaggtaggcatggtgacagaccaaaaatttatcccatcaaactcaaccattaggcaagctaagcttaataatggcgagaattttgatattgcccatcttgccccaaatcgcaatagccctgtacatgcaatgcctgtgcatcggtttggttttggcgtaggtcaggatactcggcttagtgatcgtgcagtttatggcattcaattaaatggtgcctatcaagatttactggataatcctcaaggtgttaggtctttgttggatttacaagcgatgtcagctaaactgattactgatggcagtaagcttaagcttgaagacttaacgattttttcaactcgtagcctaaatcctgccaatactgccaaaaataatgcaaccgctaaaaaaggtgtgggtttggcgatggcatttcatacaggtttgagacgaacgattgatgcatccaataaagccaatcatcatcatttggtgttggatgtggatataaagacaggcaaatcatggaattttgggcaggttcgccaaaatagcggtgagcttgcaaatacaacttgttatacattggtaggtggcggtacgcaaatagggcgggttaatcaaggctatcgcttgagagttggtactgatattggctgtattcattatgctaacgagaatttgcgtggtttaatgcagttatcattgccttattattaccattttgatgatgcaccaagtgaccgctcgggttattttcagcctgccttgagtgttggcatacaagcagatatcgcaccttatcatgccgtgcgtctgactgctcagcgtgaaaaattaaacagcgattatgcaactcaagcgatgttgtcagtacaaaggtatttt

SEQ ID NO: 191 - DNA, 180 bp, Moraxella catarrhalis
gtggcatcacgcaccttaaataactgtgccaagcttgactctgctaatgctgaacacataccaatcaaggcaatcagccacatccaaaataccgcaccagcaccgccaataccaattgcaattgcgacacctgcaacattgcccacgcccacacggcttgccaaccctgtcacaaatgcc

SEQ ID NO: 192 - DNA, 3285 bp, Moraxella catarrhalis
atgaccgaccaaatcaccgactacaagaacaccctaaatcttgccgataccacttttgccatgcgaggagaccttgctaagcgtgagccactttggttggaacaatgggaaaaagacgatgtttatgggcaaattcgtcaggctcgccaaggccgcaaaacctatattctacatgacggccccccttatgctaatgggcaaattcacttaggccatgtggttaataaagtcctaaaagatattatcatcaagtataaaaccttggatggttatgacgccccttatgtccctggttgggactgccatggtctgcccattgagcaaaaagtagagcaaaaaattggtaaagtcggacaaaaggtcaatgcaacaaagtttcgtgaagcgtgccgagagtatgccaaaagtcaggtgcaactacaaatggcagattttaaacgcttgggtgtgcttggcgattgggacaatccttatttgaccatgaattaccaacaagaagccaatatcgtgcgagcattgggaaagatttatgacaacggtcatatcgtgcgtggcatgaaacctgtcaactggtgcttagattgtggttctgccttagctgaggcggaggttgaataccaagacaaaagctcagatgccatctatgttggctttgatattgtcaatcgtgaaaacctacccatcatcgccaatatcagtggcacgcttcaagccgtcatttggacaacaaccccatggacactgcctgccaaccaagcaatctcggtacatggcgattttgattatgccgtcattaagggcaaaaaaacccccatctttgcactaccaagccaaattgacagtaaaaattttaccctaagaaccctaaccaaagccgataagcaggcactacaagcgtgtgcatccgaccctgccatttggcaatttatgccaaccaaacgacacctgccagaggtgtttgaaccattttttgaacaagcagtgaaagataaagcctatgccattattgataagcgaactggcaatatcatcggcacaacccgcttttgtcatgacaatgccaaagatgataccatcggtattggttttaccttcatcacacccgaattttggggcaaaggggtaaatgatgagattaaacacaccttattaaaccacgcctttaaatacagaaatgccgtctgttttcagatacatgaaggcaatgaccgctccaaaaaggcggtagaaaaattgggggcagtttatcaaaaagatgtagaaaatgactttggtaaaatgtgggtctataccatcacaaacccaagcaccatcaatcacaccacccattttatcgtggcaaatgatttggtggcggattttagcaaaaatgtggcacttgatgatgttgagacaatcacaaccatcaaaggggcggatttgaccgtcttaaacgcccaacacccccttatcagcgaacgccaagtacccatcatcacaggcgagcatgttaccgctgacagtggtacagggttggtacataccgctcctgctcatggtgtggacgactatattgtgggcaacaaatacaatttacctgttgaaaaccccgtcagtgatgcaggcgtgtatttggacaatgccaaggtttttgtgggtgaacacatctacaaagcgcagcctaagattatcgagactttggggtcaagcggacacttgcttgaccacaaaaaaatccgccacagttatccacactgctggcgacacaaaacccccattatttttcgtgccacgccccagtggttcatcagcatggaacaaaacggacttcgccaaaaagccctaaacgatattaaaaatatcacatggacaccagcatggggtcaaaaccgcattgaagccatgattgatggtcgccctgactggtgtatctcacgccaacgcacatggggtgtgccgattaccttttttatccacaaagaaacagaccaattgcacccacgcacctccgagcttattgaaaaagccgcccaaatcattgaaaaaggcggtattgaagcatggtttgatgctgacattagcgactttttgggtgatgagagcggtgagtattacaaagtaaccgacacactagatgtgtggtttgattcaggtgcaaccaattttgctgtcctaaatcaccgcaaagagctatccaaccctgctgatttatatttagaaggctcagatcagcatcgtggctggtttcagtcatcgttactggtcagtgaatctatttatggtcgcccaccttataaacaagttttaacgcatggctttactgttgatgccaaaggccataaattatccaaatccaaaggcaataccaaaggttttgaaccatcagatattgccaataaaatgggtgtggatattttgcgtctgtgggtaggttcgtcagattatcgctacgagatggctgtatctaaagaaggctttgaccgtacaaccgatatgtatcgccgcattcgtaataccattcgctttttacttgccaatacggacgactttgaccccaaaaccgatatggtatcaacagataaactcatcagtttggataaatatatcttatatcgcaccaaacatatccaacaagagattatccaagcttatcatagcatggattttcatcaagtttgccaaacggttatgggattttgttcccaagatttgggcgggttttatcttgatattatcaaagaccgcacttataccactaaggcagatggtctgccacggcgttcagctcaaacgactttatatcacattgcccatgctttattgcgttggattgcccctattttatcatttactgcccaagaagcttggcaggttttaaaagatacacaaggctatatttttaccgctgaatggtaccagttaccagactttcagatgaatgatatcagtcacgaagattgggataaagttgccttaatcaaagatacggtgaataagtccatcgagcaagcacgcagtgataaaattgtcagcagtaatctgaccgccaaagttaccattaccgctccacaagatatcactgatatattaaataagtttggtgatgaactacgctttgtattcatcacctctgatgcaaccgtgaaatctggtgatacgctgtctacaaccatcacgcctgctgatggcacaaaatgcgtccgctgctggcatgttcgtactgatgttggtacacacgccgagcatcctgagatttgtggtcgttgtgtgcagaatttagatgatggggagatgcgtttgtatgcc

SEQ ID NO: 193 - DNA, 2277 bp, Moraxella catarrhalis
atgaataagtttcaattattaccgctgacattggcggtgagtgccgcttttacaaccactgcttttgcagctgttagccagcctaaggttgtcttggcaggtgatacagtggtcagtgatcgccaaggtgcaaaaattaaaaccaatgttgttaccttacgagaaaaagacgaaagcacggctacagatttgcgtggtttgttacaagatgaacctgccatcggttttggcggtggtaatggtacttctcaatttatcagcattcgtggcatgggtcataatgccattgacctaaaaattgacaacgcttatcaagatggtcaattacactaccaccaaggtcgctttatgctagacccccagatggtcaaagtcgtttcggtacaaaaaggggcaggctttgccagtgcaggcattggggcaaccaatggtgcgattgttaccaaaaccttagatgctgatgagcttttaagaaacagcgacaaagattatggctttaaagttggtgcaggcttatcaaccaacaaaggtcattcttatcatggtagtgcctttggtaaagcacagacaggatttggtcaggtagatgcccttgtctcttataatcaagtaaatgacagcgactataaaggcggtaaagggtacaccaatctgttgggcaatgatgtggttacaagaagtgccttggataaatccagttaccttgtcaaggcagggctaactgctggcgatcatcgatttgtggtcagccatctaaatgaagttcataaaggcattcgtggcgtgcgtgaagagtttgacttcgccaatcgtgccttgacgctagatatagaaaaagataagaaaaaacgtactgacgaacagcttcaggcagagttagataacaaatatgcaggcaagggttacaaacttggcagtaaaacaccagatggtaaaaagtataatgtggttgatgccaatggtaaattggtggctgatttagataggaacaacccaactcagcgtgaaacctaccaaaagttaaccaaccttgaatggacaggtaaaaaccttggttttgcaaatgaagttactgccaatgtctataagttagaacatggacgcaactcctctagcgataaaggtaacagctatattcttcgtgatgtacctaataccatcaatgataacggtgatagcccatcaaatatgcatgttagtgccaaaggggctaatattaattttgataaagaatttaatcacggtctattaaaaggctttggcgttgaccatactttattaaaatatggcatcaactatcgccatcaagaagctgtaccgcctagaggtattagacctggttttcaacaccaagaaaaaaccgatgctggtatttatctagaagcggttaaccaaatcaatgactttaccatcaatacaggcgtgcgtgttgaccgttttgactttaaagctatggacggtaaaaaggttggaaaaaccgacatcaacccaagctttggggtgatttatgatgtcaatcctaatcttagcgtcagcggtaacctaatctatgccactcgcagcccacgctttgctgatgctatcctaagccgtggcttccgtgatggcgttgtgagtattgctgataacgcaaaagcagaaaaagcacgcaataccgagattggttttaactataataatgggccatataccgcctttggcagctatttttggcagcgtgtggataatgccagagctactgccgatgctgtacaacaccccacagttacaacagctaagattacctatcttggcaaccaaggtcatcagaccaaccacggttatgagctgggcgtaggctataccgaaggtgcgtggcgtgcgcgtgctggcgttgctcacagcaagccaaccatgcacaatgtcaaatttaaagccaaccctgaatatgccgtgcgtacaggtcgtacatggacagcagatgtcgcctatcgcctgccaaaccccagtgtagagcttggtgtgagacacacattggttgaaggggtagatgccaaagacacttctatccttagcggtaaatttgatgataaagatggtgctattcttaaccgtgaaggctataatgtcagtgacatctatgccaactggaagccttatggcaatgataaggtgaatgtaaactttgcggtgaataatgtctttaataaaaactatcgcccacacactcagcgtgcttccatagataccttacctggggcaggtcgtgatttccgtgttggcgtgaacttcacttac

SEQ ID NO: 194 - DNA, 801 bp, Moraxella catarrhalis
atgcgtcaaatttttatgcaccgattattaccgccaacactgatggcaagctttttattattaagcgcctgcagctctggcaattctcatgccaaagatacctctaatgccagccagccaacaacccaaacttcttctcaaagcgataccacgcttgtcaagacgctccaagataatttgacccaagcaggggttgatatcactgtgacaaatgccctgccaacaaccatgcctgatatctattgggtcagctttgaaaatgcccctgcaatgttcacagataaatcgggtgaatatttaattcaagggcaaattgtcaaattaagtggtgattatccgacagatattaccgctgacattcagtcatctttggccaaagaaaccttagccaaagccaatactgatgatatgattatttaccctgcaaccagtcagcataaagcatctatttatgtttttagcgacccaacttgccactactgccgaatgctacacaaggatatcaagcaactcaatgctggcggtattgaggtgcgttatttggcgtggccacgctcagaacaagacataccgctcaccgaagcaatttggtgcagccaagaccgaaaagcagccttaacagcagctaagcttggtcaaactgtccatgccaagcattgtaaaaaccctgttcaagaacatttggcattagggcgtagtttgggcgtatcaggcacgcctgctgtttttgccgaatctggcaggcagattggtggctatatgcctgccaaagatctcatccatactgccattgaacaacga

SEQ ID NO: 195 - DNA, 1521 bp, Moraxella catarrhalis
atgaaaatctctacaactgcacgtatcttgacgctctcagcgctggcgattggcatggcagcttgtagtagcattccaaagaaaattgacacatcggcaccgattttggcggtgcctaatgtgcctatgaaggatggctatcaagtctatgatgctgacaccatcagtgtggcgcaggcaccaagcgtggcatcactacgctggcaggaattttatacaaatcctaaacttgcagctttgattgagcttgctttacaaaataacaaagacttgcaatctgcggtcttagccgtgcaatcagcccgtgctcaatatcaaattaccgaagctggcagcgtgccacaagtcggctcaaataccagtgtgacacgccaagcgaataaccgtatcgatgccaatgcttcaaccaattatcatgttgggcttgcgatgagtggttatgagctggatttatggggcaaagttgccagtcaaaaacagcaagcactacatcaatatttggcaaccaacgccgccaaagatgccgttcagatttcaatcatctcaagcgtcgcccaaggttatgttaacttagctcacgctttggctcaaaggcagttggctgagcagacgctaaaaacccgtgaacatgcgatgatgattacccaaaagcgttttgaagcggggattgattctaagtcgccaagtctacaagcagcaagttcgcttgagtcagcacgattggcagtatatgcagcagataccagtatcttaaaagccaaaaatgcgttacagctgctgattggtcgtcctgtaccaaacgagctactaccagcgatagatgccagtatgcatatgggtcatattaccacacagacattgtttagtgcaggtttgcccagcgagcttttatattatcgcccagatattatgcaggctgagcatcgcctaaaagcagcaggtgcaaatatcaatgtggcacgcgctgcttattttccgtcgattcgtttatcatctaatgtgggatttagtagtaacagtttgaataacttatttgaatcaagtgctttgggctggtcttttgggcctgcgattagcttgcctatctttgatgcaggcagtcgccgtgccaatcatgagatggcgcaagttgctcagcagtcggcattggtggattatgaaaaagccattcaaaatgcctttaaagaagtgtcggatgttttagctgagcgtgcaactttaggcttgcgtcttgatgcccagattcgccttcaggataattaccgtcaaacttatgatatcgcttatgcaagatttcgttctggattggataattatctgacggtactggacgccgagcggtctttatttattaatcagcaaaatatactacagcttgagcttgccaagttagtcagccaaatccagctataccaagcattgggcggcggtgcaagcttaactgctgagcaaatcacagaatttaatcgtcagcgtgaagccatgcgtccagccatgctgatggatgacgaaaaatcccaa

SEQ ID NO: 196 - DNA, 1419 bp, Moraxella catarrhalis
atgaaattaaatctaacagcagtgctggtcattgggctgatgaccagtatgggcgtgctgacggcgtgcagtcaacaggacgataccagcgtgcagcaacaaatgccaaatccgacggtagatgttcaaaccattatgctcgaaactgtgccagtgattcaaagttttgcagggcgtgttgccgccattgagacttcagaggttcgcccgcaggtgacgggtattattgatgaagtactgttctatgaaggtagtatggtacaggcaggacagcctttatatcggattaatgtcgatagctataccagccaagtgcaagcaggtgaagcagcggttcaaaacgctgaggcggctgtcggtaatgccgaggccacacgagcatcagctcaagcaaatttagccgctcaagaagccaatttggctcaggcacgggcagatgtcatgcgacttgagggcttattggaggttaaggcgatctctcgccaagcttttgaccaagcagtaaccgccatgcgaactgctgaagcgaatgttttggctgccagagcggcagttgcacaggcagatgctaatattcacagtgcaacagcatccgtgcaaagtgcacgcgccaatctaaacgcaagccagctggatgcaggccgtaccattgtcaaggcacccatcagtggtgtaacgagcatctcagcggtgacagcaggtgcattggtatctgccaatcagccaacaccattggtgacgattaatcggttggatgaagtgtatgtggacatcagccagtctgcaacccaaatgctaagattgcgtgaacagattgagtctggtcaagtaggtcaaggcggtgcagatgttcaactggtgcttgaagatggtcaaacttatccaatcttaggacaattattgcttgccaatgcacaagtggatacagccacgggcaacatgaccttacgcgctgtgttcccaaatcctgatggtaagcttataccgggtatgtttgttaatgctcgcttaattcaaagtgtggtgcatgaagcagctttattgccacaatcagcgatcatgcgtacaccaaaaggcgaaacccaagtttatatcgttaacgcagataacaaaatcgagattcgcacggtaacgacagcaggtacttatcatggtaattggattgtaacaggtggtattaattctggtgatcgtgttgtgattattggcggcagtaaagttaagccagaccaagaggttaatgtgcgagaactgccagctgccagcagtgaagcaaatgctgatatcagcacgccaccgccttctaaaccaagtactgttaactcaaacattccaatggcaagaccacaaagtgatacgacggttgccaacttatccgccgaagaacaagctgcgatgaacgctgctgacgaaaccaag

SEQ ID NO: 197 - DNA, 1494 bp, Moraxella catarrhalis
atgaaatttatccatgattatctaaaacatgacgagcgactatatcgccacacactgcctactccccttgataatcccaagctggtttctttaaatactcaattaatcgaccaattaggtttatcatcacttgatgcgactgcttgggctgatatcatttcaggccgcctatcgccattaactcagattgccccacataagatacaacccatcgccatggcgtatgcaggtcatcagtttggtcaatgggcaggtcagctgggtgatgggcgaggcgtattaattgcccaattgcacaataaaaaaacaggcaaactgattgatttacacctaaaaggtgcaggtctgacctcttattctcggcgtggtgatgggcgggcaatgttagcaagctgtattcgtgaatatcttgggggtcatgcgctcaatggtttaatgattgcatcttctgatgccattggtcttgttgtttctgatacccatatccagcggcgtcatattgaaaaagcagccgctttacttcgtgttagcgattgccatgtacgccttgggcactttgaatgggttgcgatgtatgctgctgattattttgagacatttgtcattaaaattatccaaagctattatctacatctgtatgatactcatcaaaacaccgctaacattagtcaattattacatgaaattgccgccaacaccgcacgcatgattgccaaatggcaactgattggtttttgccatggtgttatgaatactgataatctcaatatcacagggacaacactggattttggcccttttgcattcatggagggttttaacccaacttggattaacaatcattctgatcatacaggtcgttatgtttatcaaaatcagcctacgattgggcattggaatctggcggtggtatatcaccactttaaaagacttgtcaatcaagatgatattgatgatgcgctaatgacataccaagaggtttttgaaaatacttatcatcatggtctatgccaaaaacttggtatcaaacccagtcatcaagccatacaattgggctatcggctgctgatgctgatgcaaaacgagcgtttagattataccaatacatttcgtgctttaatcgcagttgctgatcacggtgagaatcgtacccaatttacacatgaatacacgctgctggctaatttgacaaatatcttatctgcgacatcttatgatatttggcaaaattgggttaatgattatttagattgtctcaagcaacagtccaccaaacaaacggctattaagacattacaacaaaccaaccccatctatattcttagaaatcacatggcagaacgcgctattgtatctgctcatcaaggcgattttgatgaagtggcacgattatttgcattgctagataatccctatcaacagcaaaccattgcaaccgttgatgatactcgcatggcgtttgccaatgagactgtcgcagtcagttgcttgtct

SEQ ID NO: 198 - DNA, 267 bp, Moraxella catarrhalis
atgggtttgtcaaatttattaggattaacacagtctgtcgccccaagctcttgtgctttggcaaacttatcttcattaatatcaacaacaataatgcggccagcccctgccatgcgagcaccgatcaccgcggcaagtccaataccacccaaaccaaaaattgccaccgtatcaccgggctttactttggctgtttttagaactgcacccatgcccgtggtgacaccgcaaccaagcaagcagacctcttctaagggtgcatctttt

SEQ ID NO: 199 - DNA, 2358 bp, Moraxella catarrhalis
atgtctaaaaacactttttctgcgtcattcatcgccattttatcaaaagttattttgggcgtattggcattatttgcaatcttaattttagcatttcccattgggttttatggcatggtcatgtatcttgagccaactttgcctgatgtcaaaaatttggacaattcccgctttgagatgccgctacagatttatactgccgacaacaaactgatcggacaatatggtaatcgctactctttgcctgtcacctttgacgaaattcctgagcgtatgattcaggcatttttggcggcagaagacgatactttttttgaacacagtggcatcagtgtcaaaggcatgggacgagcattgaccgaagttatcagtgataatgacgctcaaactggtggttcaaccattaccatgcaagtggcaaaaaactattttttaagccctgagcgtaccattaatcgtaagctgaccgaactttttatcgcccgcaaaattgaaaatgaactcacaaaaaatgaaattttaacgctatatgttaataaaatttatttaggtgaaggcacttatggtattcaagctgcagcacgccgctattattccaaaaatctagaaagcttgaccattgcccaaatggcgatgatcgcaggcttaccaaaagccccttcggcctacaatcctgtcgttaatcctgaacgggctatggagcgacgcaactggattatcggacgcatgcaccaagaaggctttattaccgcttctgaaaaagatgccgccattgctgaaccaatggggctaaatatctatcaagaaaaacttgatctaaatatgccttatgttgcagagatggtacgctccactttggttgaccgctatggcgaggcggtgatggattcaggttggcgtgttcaaaccacaatcaatagtagctcacaacttgcggccaatgctgccttagtggggggtttgcgtgattatgaccgtcgtcatggttggcgaggtgttgaagcagaatcagggtcgcttgaaggtcgtaaaaattttgatcatatttatcctgccaaagttactaaggttcataaccaaagctttgaagctaagcttcaatctggagaaaccgtaaccatcggttggtcaggtatgaattgggcgcgtcgctactatgatgctaaccgtgtcggtggtggctacagtaatgctcatcagatggtcaaggttggtaatattgtgcgaatctctccgatcaatgaagcaaaaacagcttggcgtatggaatctattcccaaagttcaaggtgcattggtctctttagaccctgaaaatggtgctttgcgtgccgttgttggtggttttcattttaatcacagcaaatttaatcgtgccatccaaggctatcgccaaccaggatcgatcattaagccttttatttttgctgcagcacttgagtctggtcaatatacgccagatagcttaatctctgatgctgccattcgtgttggtaggtggcaaccaaaaaatgccgatggacgctacacaggcgatatgacactacgccgtgcacttactttatcacgcaataccccagccattcgcctgctgcgttcagcaggtgttgatgaatctcgccacctaatgaatgccatgggtggacttgagatagaacgcatgccgtctacattggcattggcattgggtgctgctgacgctacacctttacaaatggcaactggttttgctaccatcattaatggtggtcatcgtatccagccttattttatcgaaagaatctataattttgacaatgaaaccatctatcaagccaacccacagcaagcctgtgcactttgctttaatgaaaatctttcggcaactaatgccaaattgcttgaattatttgaagccaataaatcagagatttctacagacacgcctagcgcaccagctggcgataggctacaaccaagaagcgctccacaatatgtcgctgccactcaagcaccccgcgtgctttcccaccaaacggcttatgacatctccaatatgatgcgagaggttattactagcggtacgggtcgcagagctcgtgctttgggtcgtagtgatgttggtggtaagactggtaccactaaccttgccaaggatgcttggtttgcaggctttcatcctactaatgtggctgtggtttgggtgggttttgatacgccatcaactttaggaaatagtgagtacggtggcgtggctgcattaccaatttgggtgaattttatgagccatgaacttcgcaacacgccttcgcaatggatcagtcaagaagatcggtcaaaagccgtcaaagcgacccaacaagttattgatttgaaagat

SEQ ID NO: 200 - DNA, 546 bp, Moraxella catarrhalis
atgtcaaacacccaacacgccccaagtcctgctcccatcacatcccccactggcaccccaaaggttggtatcatcatgggcagtcagtccgattgggcaaccatgtctttatcggcacagattttggcagattttggcatcccctttgagtgtcaagtcgtctcagcacatcgcacaccagataaactctttgactatgccaaaaccgccaaagataagggcttaaaagtcatcatcgcaggggcaggcggagcggctcatctgcctggtatgtgtgccagccaaaccccattgcctgtgcttggcgtacccgtcaaatcaagcacactgtcaggctgggacagtttattatccatcgtacaaatgcccaaaggcgtggcggtcggtacgctcgccattggagatgctggtgcgttcaatgctggactgctggcaatacagatacttgccatcgatgatgatgcccttgccacaaaactggatgaatttcgccaaaaacagacccagacggtgctaacaagcccccatccagggattgtcaatcac

SEQ ID NO: 201 - DNA, 456 bp, Moraxella catarrhalis
atgaaaatactcattgacgccgacgcactgcctgtcattgccaaagagctcatcatcaaaaccgccaatcgcacccaaacgatggcggtatttgtggcaaatcggatgaccaaactgccaccatcgccatttttatcgtatgttgtggttggtactggctttgatgtggcggatgaatatatcttacagacagcgcagcccaacgatttggtcatcacaagcgacattccgcttgccaatgatgtgctagaaaaaggggcaaaggttttgaccccacggggtgaggaatttcacaaagataacatcaaacccagattaaatgcccgagattttatggagtcgcttcgtggtacgggtgtgcttgaccccaaaagcatgggcggacaaaaaccatacagcaacaaggacaaaatcgcctttgcaggtggtctaaataggcttgctcacgcgttaccc

SEQ ID NO: 202 - DNA, 1200 bp, Moraxella catarrhalis
atgcatacccagtttgtcctaaatcaagcaaagaaagagactgttatgaaaaacctacttccccaagactggcagcagccgcacatctcagaggcggacactgcggataaatggctgataccacccatcgtggatctgtgtgcgcacctaagggagcctgggcatcagtcacatggtacgctggcaagcgaagggcgagcggcgcgccaaaatggtatcctgcatatcgtgctgccaccagacaccgatcctgtgctcgaaaacggctcgctcttaaagggtctgcgtgagaaggcgtgggcggatgggggtattcatttacatgtattgggagcattgactcagggtctggaaggtaagcagcctgcgaacttggcagggcttaagcagggcaatgcgatcgcagtgacgaatgcaggcgcaggctttgagaatgatttggtgctactgcgctgcttggagtatgcggcgacctttgggctaaaagtgtttttttatcctgatgagccaagcctatcaaaaggcggcgtggcgcatgaaggctacattgcgtcctttcatggcttgcagggtattccttggctggctgagaccattgcactgtctaagcagattttgatgaccgaagagacaggcattcatgcacattttagccaaatcacttgtcgcacctcggtagagctaatccgtcatgccaaacaaaagggcttgcccattacctgtgatgtggcgatgcaccagttacacctgaccgatgatgatattgagggttataacgctcatgcttatgtgttgccccctttgcgtagtaacaccgaccaaaaagctcttatcaagggtcttcaagacggtacgattgacgccatctgttctcatcatgaaccactgtcaagcagtgccaaacaagccccctttgcccaatgccaagcaggcatcagtaactttgacacctttgtgtcattgggggtgaaactggtggcagatggcgtgttaagtgccgagcagttggtagaaaaaatctgcctaaatcctgccaaaatcgcaggcattacagattatgagcgcattggtggggcggtactcattgacccaaatcaagcatggacggtaaccaaagacaccatgctatcagcaggcaagaacacgccttttttggggcagacgctgatgggaagggcagaaaaagtcttttttgatggc

SEQ ID NO: 203 - DNA, 906 bp, Moraxella catarrhalis
atgttaacaaaattcacagcgttagtcatgggtgtgttgttgtcggtatcggcaatggcggcggatatggcgacggcggatatggcaactttgacacgccaagcccaaagtggtggtgcagtggctcagtctgatttggctgatgagtattatcagcaaggtaaccatgccaaagcatttgaatggtacaccaaagctgccaatcaaggggaagcagaggctcaacataatctgggtgtgatgtattatgagggtcaaggcgtgcgccaagattattataaatcggttgaatggtacaccaaagccgccaaacaagggtatgcagatgctcaatttaatttggcgctgatgtatgcccaaggtgatggcgtccgccaagactatcataaagcgtttgaatggtttactaaagccgccaatcaagggcttgcagaggctcagtttagtctgggtgtgatgtatgatgaaggtcaaggtgtgcgccaagattattataaagcggttgaatggtacaccaaagccgccaatcaagggtatgcaggggctcaatttaatttggcgctgatgtattatgagggtcaaggcgtgcgccaagatgatcaagaagcggttgagtggtacaccaaagccgcaggtcaaggtcatgcagaggctcaatataatctgggtgtgatgtattatgagggtcaaggcgtgcgccaagattatcataaagcggtggaatggtttaccaaagccgccaatcaagggtttgctcaggctcaaaataatctgggtgtgatgtatgatgagggtcaaggcgtgcgccaaaatatagcaaccgccaaaatttactacggacaagcctgtgatcatgggctgcaaaaaggctgtgataattatcgattacttcatcagcagggccat

SEQ ID NO: 204 - DNA, 2631 bp, Moraxella catarrhalis
atgtcgcaaatgctaaccgaatacagagcccatgtcgctgagcgtgaagccttaggcgtgccaccacaaccattaactgatgtccaaactgccgatttgattgaactcctaaaaaaccctccacaaggcgaagaagagtacttgatagacttgcttgaaaaccgtgtgccagcaggggttgaccaagccgcttatgtcaaagccgcctttttaaatgccatcgtcaaaggcgagaccagctccccactcatcaacaaagagcgtgcggtatatctattaggtaccatgttaggcggctataatgttgcacctttggttgaactgcttgatgatgatgaactgggtgagatggctgccaaagcactcaaaaaaacccttttggtctttgatgcttttcatgatatagaagaaaaagccaaagcgggcaatgccaatgccaaagccgtgctagaatcttgggcagaaggcgagtggtttacaagtcgtcccaaagtgccagaagagatgaccatcaccgtatttaaagtcactggcgagaccaacacagatgacctatcacctgcccaagatgcgtggagtcgccctgacattccgctacacgccaacgccatgctaaaaaatgagcgtgagggcattcatccagaaaaaaatggtgaggttggtcctttgacccaaatccaagagctacttgacagaggtcatcctgttgcctatgtgggtgatgttgttggtacaggttctagccgtaaatcagcaactaactctgtattgtggttctttggtgaagagattccccacattccaaacaaaaaagatggcggtgtgtgtttgggcggtaaaattgcccccattttctttaataccatggaagatgctggggcgttgcctgttgagattgatgtaaccgagatgaacatgggtgatgagattaccctaaaaattgaccacgcaaatgcaactgttgccgcctttaaagatggcacacaaattgccaaatctaaactaaaaacccctgtactgctagatgaggtgcgtgctggtggtcgcattaaccttatcatcggtcgcaacttaacaagcaaggctcgtgaatccttgggtcttgaaccatccactctatttcgcaccccagagcaacctgccgatactggcaaaggctttaccttagcccaaaaaatggtgggtcgtgcctgtggtctaccagaggggcaaggcattcgtccagatacctactgtgaaccgaagatgacaaccgtaggctcacaagacaccacaggcccgatgacccgtgatgagctcaaagatttggcatgtctgggcttctcatctgaccttgtcatgcagtcgttttgtcataccgccgcttatccaaagccgattgatgtggtaacacatcacaccctacctgattttatcatgaaccgtggcggtgtcagcttacgcccaggcgatggggtgattcattcatggctaaaccgcatgttgttgcctgacaccgttggtaccggtggcgacagtcatactcgctttcctattggcatctcatttccagcaggttcaggtcttgtagcgttcgctgctgccactggtgtgatgccacttgacatgcctgaatctgtactggtcaaattcaaaggcaaaatgcaacctggcattactttgcgtgatttggttcatgccattccttactatgccatccaagcgggtgatttgacggttgagaaaaagggcaagaaaaatatcttttctggtcgcatcttagagattgatttgactgagatggaaaacgacttgaccgttgaacaagcgtttgagttatccgacgcttctgctgaacgctctgccgcaggctgtgccatcacggtatcagaagaaaaagtggcagaatacttacgctctaacatcgtcatgctaaaatggatgattgccgaaggttatggcgatgctcgtacactggctcgccgtgctgaaaatatgcaaaaatggcttgacaacccaagcctactaaaagcagatgctgatgctgagtacgccaaagtatatgagattgaccttgctgacatcaaagagccaatcctatgctgtccaaatgaccctgatgatgccaaactgctctcagaggttgcaggcgataagattgatgaggtattcatcggttcgtgcatgaccaacattgggcattttcgtgccgcaggtaagctgttgcaagaagtaccagcgggcagcctaaccactcgcttgtggattgcaccacccactaaaatggatgaacgccaactgatggatgagggttattacaacacttatgcccaggcaggagcaagaaccgaaatgcccggctgttcactgtgcatgggcaaccaagcacgcatcgcacccaactgtaccgccgtttcaacatccacccgtaatttcccaaatcgcttaggtcaaggggcaaatgtctatctggcatctgctgaacttgcctctgtggcatctgtactgggcagactgccaactgttgaagagtatatggggtatgcaggtaaactagaatccatggaggcggaagtttataactacctaaactttgaccaaatgggtgaatatactggcagagctgatagaattgatgttgcacagctgaac

SEQ ID NO: 205 - DNA, 363 bp, Moraxella catarrhalis
gtgcaacatcaattctatcagctctgccagtatattcacccatttggtcaaagtttaggtagttataaacttccgcctccatggattctagtttacctgcataccccatatactcttcaacagttggcagtctgcccagtacagatgccacagaggcaagttcagcagatgccagatagacatttgccccttgacctaagcgatttgggaaattacgggtggatgttgaaacggcggtacagttgggtgcgatgcgtgcttggttgcccatgcacagtgaacagccgggcatttcggttcttgctcctgcctgggcataagtgttgtaataaccctcatccatcagttggcgttcatccattt

SEQ ID NO: 206 - DNA, 504 bp, Moraxella catarrhalis
atgccttgcccctctggtagaccacaggcacgacccaccattttttgggctaaggtaaagcctttgccagtatcggcaggttgctctggggtgcgaaatagagtggatggttcaagacccaaggattcacgagccttgcttgttaagttgcgaccgatgataaggttaatgcgaccaccagcacgcacctcatctagcagtacaggggtttttagtttagatttggcaatttgtgtgccatctttaaaggcggcaacagttgcatttgcgtggtcaatttttagggtaatctcatcacccatgttcatctcggttacatcaatctcaacaggcaacgccccagcatcttccatggtattaaagaaaatgggggcaattttaccgcccaaacacacaccgccatcttttttgtttggaatgtggggaatctcttcaccaaagaaccacaatacagagttagttgctgatttacggctagaacctgtaccaacaacatcacccaca

SEQ ID NO: 207 - DNA, 1848 bp, Moraxella catarrhalis
atgacaacaacacacccccaagctgaaagcccaacacaaaaaagacagcgactaaaacaacacgccaacgccctacccaatcgtccaggcatttataaaatgctgggtaaatcgggcgagattttatatgttggtaaagcaaaatcactaaaaaatcgtgttggtagctattttgccaaaaccatcgaacacccaaaaacccaagcactggtacaacgcattgaacagattgagattatcatcacccgtggcgaaaccgaagcgttattactcgagcaaaatctcatcaaaaaccatcgaccgccttataatgtcctactaagagatgataaatcttatctatacatctatatcagtacggataaatttcccagactgtccattggtcgtggtaaaggtcggtatactcaagggcgtttttttggtccttatccatcggcacgcaatgccaaagaatcagtacagctgatgcagcgattatttatgattagaagctgtacgaacagtttttttgcacaaaggcagcgtccttgtctagaataccaaattaaacggtgtaaagcgccctgcgttggtatggtttctgccgaacaataccagtccgatgtgcgtgctgctttggcatttttacaggggcattctcatgaagtgcaagccattttggtcaaaaaaatggaggaagctgctgcggcattaaactttgaacaagccgccttttatcgagatcggcttgccatgattagcgatttacaagccaaacaggcagtatttcgcctacagggtgaagcggatgtctttgccattgctgctgatgctggtgcggttgccgtgtgtgttttgacggtgcgaggcggtcaggtattgggggtaaaaaactattttcctgatgatatcgaaccagccattaagagcaaccaagagcgtttaaaagaatttttattgtcgttttattttcaggtgagtgatgatttgcctgatgaaattatcagctctgttgctattgaagaggcatctatattggcagatattttgcaagtacagtttggcaaacgcaccacgattaagcacaaagtaaccacacaccgtgatgattggttatccatcgcaaacttaaatgccaataatgcgttatcagccaagctcaaagacagtcgggagctacaagcacgatttgagcagttaaaacaagtgcttgcccccatcaccacttgcaccattgaccgtattgaatgttttgacatcagccacaccatgggcgaagctgccatcggctcatgtgtggtgtttgaccaaaatggcccaaaaaagcgtgattatcgtcaatatgccattcatgatattaccgcaggcgatgattatgcggccatgcgtcaggtcttaatgcgtcgctataccaaacatccgttacctgatttattattgattgatggtggtaagggtcaattaaatgttgccatcgaagtattaagcgagcttggcaaattaaccgatactttgcttgtcggtgtggcaaaaggtgaggggcgtaaagctggtcttgaggtactacattttgtgacacatgagccgatagatttgcccgctgatagcaaggctttgcatctcatcatgcaaattcgagatgaagcgcatcgatttgccatcaccgcccaccgcaaaaaaagagataaaaaacgctcaagctcagtgcttgaggttatcccaggacttgggcaagtccgcaggcgtgatttattaaatcattttggcggtatacaacagctgcttggtgcatcacaagatgagatcgcacaggtcaaaggcattgggcccatgctggctggtacgatttataaggcattgcatgaa

SEQ ID NO: 208 - DNA, 333 bp, Moraxella catarrhalis
gtgcctgtgtgtcctgctggcgaccatgcgtcaaattttttgttaatggcaagcacagcaaggggcaggccgccgcccaccgccttagacatgacgaccacatcagggacaatctcagcatgctcaaaggcgaacattttaccagagcgggcaaatcctgcttgtacctcatctaggataagcacaatgtcgtggcgggcggtaacttcacgcaccttttgcagccattttttgggagcagggacgacaccgccctcgccttggatggcctctaagatgacagcggcaggcttaaccacgccactttcaacatcttcaatgaagttttcaaaa

SEQ ID NO: 209 - DNA, 903 bp, Moraxella catarrhalis
atgtctaaaacgccacaatctgccatcattcccgaccattgccgtgctggcatctttatggagggtgattttatcaccaacaacacggcaaccatcgcagatgcctgccgccaagctttgcacactttaaatgagctacaagccaaatttactggcgaatctttagggctgaccattggctttggtgcacaagcttggcaacgctttggctataccaaagaaggcggtcaaatcaaaccatttcgcccattgggtaatggtctggcacctgccacgcagcatgatgtgatgtttcatattcagtcaatgcgtcatgatattaattttagcctagcaaaagaattggtagcgatatttaaggatatcgtccaaattcaatcagaaacgcatggctttcgctgggtagaaaaccgtggcttagaaggctttgtagatggcactgaaaacccccaagatgatgccgtgagtggcgtggctgccatcgctgatggtgatgatgctggcggcagctatgtgcttttacaaaaataccgccacgacctgaataaatgggataagttacctgtgtgcgaccaagaaaattctattggccgctcaaaagttgataatattgaatttgataaagccaaacgcttatcagattctcatttgggtcgcaccaatcttaaggaagatggtaagactttggaagtggtacgcaggagcctgccttttggcacagtgactggcgaacatggcttaatgtatatcgcttatgcagcacggctatggaatattgaagctcagctacttagtatgtttggcgagaccgatggtaagattgatttgctgcttaagcatgtcagtacggcggtttcgggtgcttattattacgcaccttcggttgaacgcttagaaaatcta

SEQ ID NO: 210 - DNA, 198 bp, Moraxella catarrhalis
gtgatgataataagaagacagccagctcgccagtttgagcaattcatcatcaatgatagcgtcatcatcaatcaattgtttgataggtctaagcttatgaggtgcgataagactgtcggatgcgtcaatcagtccaatgacaacaccaatcagccgcctagccccaaaataaaccagcactctggcaccgattttggg

SEQ ID NO: 211 - DNA, 2448 bp, Moraxella catarrhalis
atggcaaaaaaaaaccaagccacaggcgattactctaccgtcagtggtggccaatctaatatcgccaaaggcaattactctaccgtcagtggtggccaatctaatatcgccaaaggcaattactctaccgtcagtggtggcgatgataacgaagccaacggcgagagctctaccatcggtggtggcttttttaacgaagccaacggcgagagctctaccgtcagtggtggcgattataacgcagccaacggcaatagctctaccatcggtggtggctttttgaacgaagccaacggcaatagctctaccatcgcagggggtaggaataaccaagctataggtgataactcaacggttgcagggggtagggataaccaagctacagctcgtaactcaacggttgcagggggctataacaacaaagccacaggcatagactctaccatcgcagggggcaggggtaaccaagccacaggtgcaggttcatttgcagcaggtgtaggtaaccaagccaataccgacaacgccgtcgctctaggtaacaagaacaccatcaatggcgataactcagtagccatcggctctaataacaccgttgaaaaaggtcaaacaaatgtctttattcttggctctggcacatcacgcgcaaagagtaactcagtgctactgggtaatgggaccactggcaaagaagcgaccactgttgagcatgccacagtaaatggcttaaccctaacaggatttgcaggtgcatcaaaaactggtaatggtactgtatctgtcggtagtgagaataatgagcgtcaaatcgttaatgttggtgcaggtgagatcagtgctaagtcaacagatgctgttaatggctcacagctacatgctttggccacagttgtcagtcaaaatcaatctgatatcacagaacttaaagatggtataggaaaagatttattggatctaagcggtcgtcttcttgatcaaaaagcttcgatttataaaaccgatcacagaagtgttgaaaatagagtttacattcgtaaaaacgaatctgatatcacagaacttaaagatggtataggaaaagatttattggatctaagcggtcgtcttcttgatcaaaaagcagatattgctcaaaaccaaacagacatccaagatctagccgattataacgagctacaagaccagtatgctaaaaaacaaactgacgccattgacgctctaaataaagcaagttctgagaatacacaaaacatcgaagatttagctgcttacaacgagctacaagatgcctatgccaaacagcaaaccgaagcaattgacgctctaaataaagcaagctctgagaatacgcaaaacatcgaagatctggccgcttacaacgagctacaagaccagtatgctaaaaaacaaactgacgccattgacgctctaaataaagcaagctctgaaaatacgcaaaacatcgaagatttggccgcttacaacgagctacaagaccagtatgctaaaaaacaaactgacgccattgacgctctaaataaagcaagctctgaaaatacgcaaaacatcgaagatctggccgcttacaacgagctacaagatgcctatgccaaacagcaaaccgaagcgattgacgctctaaataaagcaagttctgagaatacacaaaacatcgaagatctggccgcttacaacgagctacaagatgcctatgccaaacagcaaaccgaagcgattgacgctctaaataaagcaagttctgagaatacacaaaacattgctaaaaaccaagcggatattgctaataacatcaacaatatctatgagctagcacaacagcaagatcagcatagctctgatatcaaaaccttggcaaaagcaagtgctgccaatactgatcgtattgctaaaaacaaagccgatgctgatgcaagttttgaaacgctcaccaaaaatcaaaatactttgattgaaaaagataaagagcatgacaaattaattactgcaaacaaaactgcgattgatgccaataaagcatctgcggataccaagtttgcagcgacagcagacgccattaccaaaaatggaaatgctatcactaaaaacgcaaaatctatcactgatttgggtactaaagtggatggtattgacggtcgtgtaactgcattagacaccaaagtcaacgcctttgacggtcgtatcacagctttagacagtaaagttgaaaacggtatggctgcccaagctgccctaagtggtctattccagccttatagcgttggtaagtttaatgcgaccgctgcacttggtggctatggctcaaaatctgcggttgctatcggtgctggctatcgtgtgaatccaaatctggcgtttaaagctggtgcggcgattaataccagtggtaataaaaaaggctcttataacatcggtgtgaattacgagttc

SEQ ID NO: 212 - DNA, 2223 bp, Moraxella catarrhalis
atgaataaatctaccattatctacacccataccgatgaagccccagcccttgccacgcattcgctacttcccatcattcgtgcgtttggtgcaaccgctggcgtggattttgtgaccagtgatatctctttggcaggtcgtattttggcggcttttccagagtatctcacccaagagcagcaaacccctgatgctctagcccaacttgccgaactggtcacccagcctaaggccaatatcattaaactgcccaatatttcggcatccatgccccagctgctggctgccatcaaagagcttcaggcgaaaggctatcagctgccagactatccaaccaacccccaaaccgaccaagaaaaagacattcaaaaacgctacgataaaatcaaaggcagtgcggtcaatcctgttttgcgtgagggcaactctgacagacgcgccccaaaagcggtcaaaaacttcgccaaaaaatatccgcacagcatggggcaatggagtaaagacagccaatcacatgtggcaacgatgaatggcggtgatttttttgctaacgagcaatccaaaactgtggcggatgccacaacagtttcttttatatttacagacacccaaggcaaccaaagccagcttcgcaagcctctggcactaaaagcaggtgagatcatcgatgcgaccatgatgagcaaaaaagccttgctaagctttttaaaagagcaagtccaagacgccaaacaaaaagatgtgctattttccctacacatgaaagctacgatgatgaaagtgtctgaccccatcatctttggtcatgcggtgcgtgtgttctttgcccctgtatttgagcaatatggcgataagctggcagaagctggcattaatgtaaataacggctttggccatcttttggcaaatcttgataaattagacgctgatacacgcaaaggtgtcacagatgccatcgcacaagcctatgcgaccaatccagatatcgccatggtagacagcgataaaggcatcaccaacttacatgtaccaagcgatgtgatcgtcgatgcgtcgatgcctgcgatgattcgtaattcaggtcgtatgtgggataaaaatggcaacgccaaagacaccaaggccgtcattcctgatagcagctatgcccatgtgtatcaagcggtgatcgatttttgtcgtgagcatggtgcgtttgacccaaccacgatgggcagtgtccctaatgtggggctgatggcacaaaaggcagaagaatatggctcgcatgataagacttttgagattgagcatgatggtacagttgagctgattgatgatcatggcacggtgcttagctctcataccgtagaagcaggcgatatttggcgtgcttgccaaaccaaagatgccgctgtcaaagattgggtaagcttggcggtgaatcgtgctcgcctaagtggcacgcctgccattttttggctggataaaaaccgtgcccacgatgctgagctaatcaaaaaagttcatcactatttgggcgatttggataccgatggcttagatatccaaattctaccgcctgccgatgcgtgcttggcaagtcttgagcgtatgaaacaaggtctagacaccatttcggtaacgggtaatgtgttgcgtgattataataccgacctattcccaatcctagagcttggtacttctgctaagatgctatctattgtacctttgatgaatggtggcggtatgtttgaaacgggtgctggtggctcagcacccaagcatgtacagcagtttaacgaagaaaatcatttgcgttgggacagcttgggcgaatttttggcgttggcggtgtcatttgagcatttggcacagaccacgaacaacgccaaagcacaagtcctagcagaaacgcttgaccgtgcaaccgaaaaactgctactcaatgacaaatcaccaaaacgcaaagttggcgagcttgacaatcgtggcagtcatttttatttagccatgtattggtcacaagcgctggcagcccaaaacagcgataccgccatggcggataaatttgcccccatcgccaaagccctaagcgataatgaagacaccatcgtcgccgagcttaatcaagttcaagggcaatctgttgatatcggtggctattatgcccctgattttgccaagactgcagcggcaatgcgtccaagccaaacgcttgagcaaatcctagcacagcttcac

SEQ ID NO: 213 - DNA, 1074 bp, Moraxella catarrhalis
atgccaatttttatccatgctttaaagatgagatggcagcttttttacaatttttgtcaaacaaatcatgttataagtcaaaataagtcaaaagccaaaaactcatcaatcaccaatttagtattagccaacatcaccatgacccaaattatcctatcatccaaccaaattcaccgcctgcatcatgcgttttttgtgccacaaggtgaaataaaagccactttgcttatcgtgcatggcatgagtgagcatggcggtcgttatgctgattttgcaaggtttttggcagataatggcgtacttgtggcaacttatgaccaactggggcatgggcagacagtcaaggacaaatacgagcttggtttttttgacgaaaaacaccccgtccaaaccctgtgtaaagatgtcatcatcatggcggataaattaaaagacaaggcacgcacgctcacctcccgcccagtcccccattatatcatggggcattcgatggggtcattcattgtgcgaacggtactgacccatcacagtacacgctttgatggcgtgatactcatggggacagcagacagttttggactgctcaatcgcatgagtttggtgagctttgggctattaaatcagctgtttgccaaacaggtgaaccaaaaggctgctcatctgatgaatcatgttttactctcccagcttcgctcgcccatcagtgcctcaccatttgcttggcttagtgaaaatattgatgccgtcagagcctttgaaacagatccgctgacaggatttgcctttaccaataatggctggatgactttatttgctttgatgcagcgtgccatgcgtcctgattggtataccaatatgccaagcaattacccaattttattaatcagtggcaataatgaccccgtaggcaatatgggtcaagacattcaaacactacaagaaaaactgatacatgccaactgctcggtcagtgttcaactttatcctaatatgcgtcatgagccactgcatgaaaaacaagcacaaaaagtctttgtggacatcttagcttggattgagcgtcatctaagagtt

SEQ ID NO: 214 - DNA, 384 bp, Moraxella catarrhalis
atgacgcatttaattttattaaaccgacaatgtaaggcaatggcaagcttagcagacatatcatccacacaatctagcacgatgaccgccctaccttcagcttttaatgctgccacacgagcacgattgggtaagatggtcttgatattatcgaccgtcaaaaactcatcaatacagtcaagttgtacccttgggttaatgccacgcaggcgttctgccatcacttcaattttattttcgcccagtgtttggcttagtgcaggcaattggcgattgatattactttcgaccaagacatccatatcaaccaagacaatttgcccgatggctgttcgtgccaaaccctcggccacccacgaacccacaccgcccacaccaatgaca

SEQ ID NO: 215 - protein, 295 aa, Moraxella catarrhalis
MNYKHAYHAGNFADVVKHILLLQLLSQFSAKAKPFYVLDAYGGRGLYSLASSETQKTQEAQRGVVVLEQAVKAGLDGLPNAVSRYLSDLAFARQKYDQYVYPGSPWWIAHHGEYHSTNAPLRAEAFETVADEYDALNYQLYQLPIGIHHRDAFEGVRAVIPPKEKRGIILLDPPFEQEHKDFSRLVDLLVSSHKKFATGTFVLWYPIKNIEAVELFYKKMKRTGIKKQLVCELNLYPNDVAVGLNGTGLLVINPPWQFADNAQEVIEFLAPILKPKDAPQMTLGEMAVVKWLVAE

SEQ ID NO: 216 - protein, 486 aa, Moraxella catarrhalis
MPNSTKVKTLPKRLIEIPEMRRIQNIHFVGIGGAGMCGIAEVLANQGYVVTGSDIKANAMTERLENLGVTVHVGHDASNIKMADVVVVSSAIDRQNPEIRAALKAHIPVVRRADMLGELMRYRHGIAVAGAHGKTTTTSLLTMMLTEAGLDPTYVIGGKLNASGKNAALGASRYLVAEADESDASFLSLRPMACVVTNIDEDHMETYEGSFDKLKQAYVQFLHNMPFYGLAVLCGDDKELYAMIDDIARPVITYGLEKHNDVQAVDVIADGTKTHFTVLRKDKKPLPITLNIPGIHNVYNALGAITMATDEGVSDKAICQAVEKFAGVGRRFENNGSYPLTDGSGDVVLIDDYGHHPTEIAMTIKAARQSYPDRRLVMMFQPHRYSRTRDCFSEFVNVLSQVDKLILLDVYSAGEELIKGATSNDLARSLRERGQVEPIVLNVNDKEQITQVLKITLNANDLLMTQGAGNVGQLCQELVKNGLFLG

SEQ ID NO: 217 - protein, 271 aa, Moraxella catarrhalis
MSDKNPTQISMRDLLEAGAHFGHQTRFWNPKMSQYIFGARNRIHIINLEHTVKQFNEALTFVNKQAAARNKILFVGTKRAAGAVIREQAQRAGMPYVDHRWLGGMLTNWKTLRQSITRLKELEKQAEDGTFAKLTKREALERTRQMEKLERALGGIKEMGGLPDALFVVDVDHEAIAIKEAKNLGIPVIGIVDTNSNPDNVDYVIAANDDAIRAISLYVTAMADAIIAGKEYAKTQGHADAADADKQANRENATAPVEDKVDQAGQVVNNY

SEQ ID NO: 218 - protein, 1208 aa, Moraxella catarrhalis
MRLKSLKLAGFKSFANPTTFTFRHDITAIVGPNGCGKSNVIDAIRWVLGETSAKQLRGGAMSDVIFAGVEGRAAKSLASVELIFEHTQDETHGIRHELNLYQELSLRRQVTKEGKSDYFINGQRVRRRDVVDVFLGTGLGARSYAVIEQGMIGRIVESSPMQLREFIEEGAGVSRYQARRAETEKKLGETQDNLKRLSDLQGELKKQHKTLIRQAQSAKQYQALNDELKTLQKEELIRRLFEAWHHHEQKKIEQGKSGEVLAKLDAKANQVRRELDLLSARVAEAQWLKDDAKDNHHNAQMAEQTAQHNFYTVNSQITQNDEKIARLQAQHQEALTKINQAQDELLQINQSLDVITPKAEAMTHEITHAKQAQSEVQLTWQSHRDELSSLMQEKNNLENLKKLAQSQRQRLEIGLNKWQVRYDELITAKNLFSDTIEVQNQLSADTLKAVALRQKLEHLNDDEMLKSLVDELTQAVQTSQIHVQSQEKRHASLMGEYEILHKLVHTKVPSHKITTPPDADTSIALNALPSLKESLVLTEMGLGYADVLDQFLGFWLNARLSDELPTAVLGHVMDDNDYMILKSGKTSDTDMTALAASANERISQLPTSIQQQLVRFDRLFSMPTLELFGCCYLYVGDEPLTDLDTNVPFGMIIMTKAGWLVGSFGMLHLSKLGDTSSQFLSDRKKHLERLEVLEDELNTLEDSLEKDQKQLKQVLTRLQSSKIELEEITAQKNVVTQQLHQLEQGLTMLTAKLDSEKARRESIDSQLKRLDDENSSIKNELQELNMQIETCDFGLRELEPKVEQANQAMAVQTVRIDEAVAKLKTQNDTYQALQIKLGTLTQAKTHAERLLEMAKHSASQTQADIETTKSTQQELSQKLPVLEEAFKAAKAVSHELKIASDEYELAAKAQQIAQSQLQETLTEAHTKFATAQATLAQISADTAVGESRVQDIGGELMRLDESFNLASKLADFRTNPNQNFTDNSARQNQIKSKIAELGAVNLAATAELAELEARVSPMDEQINDITQSMKKLQDAIRAIDEKTKTLFLTALEAVNKELNALFSKVFGGGQASLTLMADDDLPKSDKWRAGLVLMAQPKGKKNSRLAVLSGGEKTLTALSLIFAIFKQHPAPFCVLDEVDAPLDDANVARFTGLIRELADDVQFIFISHNKLAMQIADELKGITMPTAGISSLVTVDLQEAQKYLEVND

SEQ ID NO: 219 - protein, 724 aa, Moraxella catarrhalis
MSKQQYLLSGVASAMAFALFASSVASFAQASDRTAFIQKPEQRVTARQVAILLDRAHYNDQRLDESMSQVILQQYFDKLDPNRTLLLQSDVDEFISKYGKTYAAYLIRGDLTPGIEIFERFRTRSFEYFKAAKAHLATDIDLYTNKSIILDREKAPRFRSKKEQLEYWKNQTTLSLITIMINQDSDKAKDQVYLQNPELARGQDLVKAESRTPKEILLNRIKRQEEQLERLKNDEVMESILDAAAIAYDPHSNYYAPIQAQDIQIQNSLQLEGIGVSIRPDRKNPDYTRIISLVDGGPAAKSGQILANDLIIGIAQSDGEMVDTIGYSTREIVALIRGTRGTEVTVKVKQPNTPDSQARTVTLVRDIIRQEESGVQYRVIDMPYDGSIKKVGVIEIPSFYLNFKARREGIDASQYRSVSHDTQKALQALTDQGIDGLVVDLRNNPGGSLDEVAKMLAMFIKEGPLVQIRDNRGNVQVFEDTDGGHQFYDGKLSVLINLGSASASEIFAAAIQDYGLGLVVGSTTTGKGTAQTQRDDLALGSMTLTQRKFYRVNGGSTQTKGVVPDVELVNIYEGIEFGEREYKNPLPWDTINSTNYHAEGKYSPSLLSSLNKQSKARQASDPQFRYLSELNAIRTLDDDKKPTEINLQKRRARLDMIEKRTLAAENARRQATGEAPFVDWSTYQANLEALAEERSAMKENERPKLPESEVYVFEAARLMFDAER

SEQ ID NO: 220 - protein, 1405 aa, Moraxella catarrhalis
MKGPADNGVKEFDSIQISLASPEAIKSWSHGEVKKPETINYRTFKPERDGLFCAKIFGPVKDFECLCGKYKRRKFQGIICERCGVEVTAAKVRRERMGHIELASPVAHIWFLKSLPSRIGLLLDITLRDIERVLYFESYIVTDPGMTSLEKYQLLDDEEYFNALEQYGDEFIAKMGAEAVQDLLRDIDVDGEIDELRTAIPQTGSETKLKKMSKRLQLLESFRDSNNKPEWMVMTVLPVLPPDLRPLVPLEGGRFATSDLNDLYRRVINRNNRLKRLLELNAPDIIVRNEKRMLQEAVDALLDNGRRGRAITGSNKRPLKSLADMIKGKQGRFRQNLLGKRVDYSGRSVIVVGPTLRLHQCGLPKKMALELFKPFTYAKLLQNGIASTIKAAKKMVEREEPAVWDMLAMVIREHPVLLNRAPTLHRLGLQAFEPVLIEGKAIQLHPLVCAAFNADFDGDQMAVHVPLTLEAQLEARALMMSTNNILSPANGEPIIVPSQDVVLGLYYISRGGVNAKGEGMVFSTVNEALRAIGSDDLSVNAKIKVRVAETILDEKTGEKISHTSIQDTVAGRLLIWNIMPEGMAFSECNTEMTKKNISKLLNSCYRKLGVKESVMFADHLMYLGFAQATLSGISIGMEDMVIPPTKKQIVDTADAEVRDIEQQFEQGFVTAGERYNKVVDIWARTSDKIANAMMDNLSKDDVINADGETETQKSFNSIYMMADSGARGSATQIRQLAGMRGLMAKPDGSIIETPIKANFREGLTVLQYFISTHGARKGLADTALKTANSGYLTRRLVDVAQDLVITQDDCGTDAGQRMTPVIVGGEIVERLGDRVLGRVAAKDVVNADGDVVVPSGALIDERLVEKLDANAIDEVYVRSVITCEATQGVCAKCYGRDLARGHLVNIGESVGVMAAQSIGEPGTQLTMRTFHVGGAASAASVDNSVSVGNAGSVRFHNMKTVQHADGHLVVVSRSAEIGVADDQGRERERYKVPYGSSVLVRDADAVEAGQVIAKWDPHTHPIITEFSGTARFSDITDGMTATVKVDEMTGVRSFEILTSKDRPSIAKDLRPAIILDTDEGKEVVYFLPNETIIRVSEGEHVTAGSVLGRVPQATSGTKDITGGLPRVADLFEARRPKDHAIMAEMSGVVSFGKETKGKNRFIITNEDGDVHEELIPKWRQINVFEGETVERGEVVSDGPQNPHDILRLKGETALANYIVNEVQEVYRLQGVKINDKHIEVIVRQMLRKVEVVDGGDSSYFKGDQAEYSKIRTLNAELIANNKFPVQYERQLLGITKASLATESFISAASFQETTRVLTAAAVMGKVDDLSGLKENVVVGRLIPAGTGLAYHQSRQRKAQNAGNQTAQVDELLSVITAEPPTTSEDNLSIEDNFAKAFADELGSQE

SEQ ID NO: 221 - protein, 1363 aa, Moraxella catarrhalis
MAYSYTEKKRIRKSFSKLPDVMDVPYLLAIQVDSYEQFLQEHKKPKARANIGLQAAFSSIFPIESHSGNAQLQFVEYYLGEPEFDERECIMRGSTFAAPLRVKIRLIIKDKENKTAIKDVREQSVYMGEIPLMTDNGTFIINGTERVIVSQLHRSPGVFFDHDKGKSHSSGKVLYNARIIPYRGSWLDFEFDAKDLVYARIDRRRKLLATIILRAIGMDTAQILDQFFEKVEVFKGDESFEIELVADRLKGEMAQFDIIGPDGNVIVEQGQRINALRVKRILNSGMTKLAVPDEYLYERIIGEDIVVGDEVLVRANTLIDHEILVKLAEKNVQSFKILFTNDIDHGAYIADTLRADTIVTREEALIEIYKVMRPGEPPTLDTAEKLFESMFFSQERYDLSNVGRMKFNRRLGREFIDTDDMDVQREQGVLSNQDIVDVLKELIEIRNGRGEVDDIDHLGNRRIRSVGEMTENQFRIGLARVERAVKERLTTADSDNLSPQDLINSKPVAASIKEFFGSSQLSQFMDQNNPLSEITHKRRVSALGPGGLTRERAGFEVRDVHTTHYGRVCPIETPEGPNIGLINSLATFAKTNNFGFLETPYRRVVDGRVTDEIEYVSAIEEVGMVIAQADSPMNDKGELTEEMVSVRHDGEFVRMSADKVTHMDVSPRQVVSVAAGLIPFLEHDDANRALMGSNMQRQAVPTLRSDKPLVGTGMERHVARDSGVCVVAKRGGVIEEVDASRIIVRVNEDEMTAGEAGIDIYNLIKYTRSNQNTCINQRVIVNEGDEIERGDILADGPSTDLGELALGQNMRVAFMPWNGYNFEDSILLSERVVQEDRFTTIHIQELTCVARDTKLGPEEITGDIPNVGEAALANLDEAGIVYIGAEVDAGDILVGKVTPKGESQLTPEEKLLRAIFGEKAADVKDTSLRVPSSTKGTVIDVQVFTRDGLEKDSRAKSIEKAMLDDYRKDLKEELVIFEAAAKGRILSLLDGKKVSGGAGFKAGTILSTKDIENLPLESLLDIQPAEEEVSERLGQIAEFLSDKQKDIDNKFTEKKRKLTQGDDLAHGVQKIVKVYLAVKRRIQPGDKMAGRHGNKGVVSRIMPVEDMPYDENGNPVDIVLNPLGVPSRMNIGQVLETHLGMAAKGLGDKINAMLRSQVAVSELREFLDKIYNQVGGEQVDLDSLSDEDLLALCQNLKDGVPMGTAVFDGAKETQIKELLSLADLSTTGQQTLYDGRTGKKFDRPVTVGYMYMLKLNHLVDDKMHARSTGSYSLVTQQPLGGKAQFGGQRFGEMEVWALEAYGATYTLQEMLTVKSDDVEGRTRMYKNIVDGEQYMNPGMPESFNVLTKEIRSLGINIDLKEKK

SEQ ID NO: 222 - protein, 119 aa, Moraxella catarrhalis
MIPFLLAGALIAGVFVATAFWKEIKSFIQASIERIKTHLIPSMIVGFKTYLQTGNALYATAKALQKFFSKNERGQWQETIMTRNVPANEIPEDIRRKVENNRGPVDITDEVQAELHLEV

SEQ ID NO: 223 - protein, 115 aa, Moraxella catarrhalis
MCAPASSSGKMTPRAAPPAPIRAIFLLSSSIACAYKSATNPRPSVLSPYRPCWSCKMVFTAPAARACVLRRPFDLIISNAISLKGRVIFAPTPPPAKKADTTAVKLSASLGQYCF

SEQ ID NO: 224 - protein, 459 aa, Moraxella catarrhalis
MLKHHFATTYTPSQITALITTHHPDWQVCFLNNAHRPVIGICPKVAWTATFDKNLYIHKKTRQADGVQSLNGRRYPSTYDNWQHELTAYANQMNLDDYHGLNHSSYVHGFMGFISYDLSAHQLNHRITIKPNQPCGYLAHYDIYLQPIKDGYNLIGMGVCSEFFQRITHQLSDLLCRCPPTASPIDFQPIWTKTEYAKAFYQTQEYLKAGDTYQINLTQKWHAHLDRLANHLPDLQDTMNAPFAGFLQLGEFELLSISPELFFEFYKTNGKIHLITKPIKGTRPRHTDPIIDDELKQSLANSEKDISENLMIVDLLRNDLGKYAQIGTVKTPKRFAIESFKNVHHMVSTVTATLSDTHPITVLFGSLPAGSITGAPKKRACEIIHELETSPRGAYCGTMGYMNFDGTGSWNVLIRTLQKWQECEIWAGGGITIKSNVDDEYQECQDKIGTILAKMSKPK

SEQ ID NO: 225 - protein, 54 aa, Moraxella catarrhalis
MGKGALSLFKPSPKPSPKPSPKPSGLSKLSKLPKSLPKPSSDKASADGSSCVGV

SEQ ID NO: 226 - protein, 1000 aa, Moraxella catarrhalis
MSKSITKTQTPSVHTMTTHRLNLAIKAALFGVAVLPLSVWAQENTQTDANSDAKDTKTPVVYLDAITVTAAPSAPVSRFDTDVTGLGKTVKTADTLAKEQVQGIRDLVRYETGVSVVEQGRGGSSGFAIHGVDKNRVGITVDGIAQIQSYKDESTKRAGAGSGAMNEIEIENIAAVAINKGGNALEAGSGALGGSVAFHTKDVSDVLKSGKNLGAQSKTTYNSKNDHFSQTLAAAGKTERVEAMVQYTYRKGKENKAHSDLNGINQSLYRLGAWQQKYDLRKPNELFAGTSYITESCLASDDPKSCVQYPYVYTKARPDGIGNRNFSELSDAEKAQYLASTHPHEVVSAKDYTGTYRLLPDPMDYRSDSYLARLNIKITPNLVSKLLLEDTKQTYNIRDMRHCSYHGARLGNDGKPANGGSIVLCDDYQEYLNANDASQALFRPGANDAPIPKLAYARSSVFNQEHGKTRYGLSFEFKPDTPWFKQAKLNLHQQNIQIINHDIKKSCSQYPKVDLNCGISEIGHYEYQNNYRYKEGRASLTGKLDFNFDLLGQHDLTVLAGADKVKSQFRANNPRRTIIDTTQGDAIIDESTLTAQEQAKFKQSGAAWIVKNRLGRLEEKDACGNANECERAPIHGSNQYVGINNLYTPNDYVDLSFGGRLDKQRIHSTDSNIISKTYTNKSYNFGAAVHLTPDFSLLYKTAKGFRTPSFYELYNYNSTAAQHKNDPDVSFPKRAVDVKPETSNTNEYGFRYQHPWGDVEMSMFKSRYKDMLDKAIPNLTKAQQEYCKAHLDSNECVGNPPTPKTSDEVFANLYNATIKGVSVKGKLDLHAMTSKLPDGLEMTLGYGHTKLGKFDYIAPKDADGWYQARPAFWDAITPARYVVGLNYDHPSQVWGIGTTLTHSKQKDENELSALRIRNGKRETQTLTHTIPKAYTLLDMTGYYSPTESITARLGINNVLNTRYTTWEAARQLPSEAASSTQSTRYIAPGRSYFASLEMKF

SEQ ID NO: 227 - protein, 871 aa, Moraxella catarrhalis
MSTVKVPHIFYQKRTLSLAIASIFAAVVMTGCRSDDISVNAPNVTQLPQGTVSPTPNTGHDNANNANNQGNNTDNSTSTTDPNGDSNQLTQAQKTAAAAGFFVMGKIRDTSPKNDPDYSNDLKQQWLGKLYVGIDAHRPDGIGKGKNLRQPITANDIKPLYFNKFPALSDLHLDSERHRFDPQKINTIKVYGYGNLTTPSNNNTHINHQQADNVQAKKSADAYENIRFGYLELQGSSLTQKNADNQNEQDRIPKPMPILFYHGENASSQLPSAGKFNYKGNWLYLSDVKKRPALSAADERVGTYLNASGKANEGDVVSAAHIYLNGFQYKHTPATYQVDFDTNSLTGKLSYYDNPNQQNNKGEYLKSQFDTTKKVNETDVYQIDAKINGNRFVGTAKSLVNKNTKTAPFIKELFSDAANPNNPNPNSDTLEGGFYGKSGDELAGKFLSNDNASYVVFGGKRDKTDKPVATKTVYFSAGFEKPSTSFVDNETIGGIIDKAKLNDKINEQIDDGDIPTSDERYNEFPWGEKKAEFTKKVSSSTQAVPAYFGQHDKFYFNGNYYDLSANHVDKLAPTDAVKANQSIKEKYPNATLNKDKVTTIVLQEAKADKPYTAIRAKSYDHISFGEVLYNDNKGNPTRSYFVQGGRADASTTLPKAGQFTYNGLWAGYLIQKKDKGYSKDEEIIKAKGHPGYLLTENFTPEEDDDDSLVASADSQNDDADDADDDGADNVYHAGDIRPEFENKYLPINEPTHEKTFSLDGKNKAKFDVDFDTNSLTGKLNDERGDIVFDIKNGKIDGTGFTAKADVSDYRHEVGNNSSGGFLYNIKDIDVKGQFFGTNGEELAGQLQYDKGDGINDTAEKAGAVFGAVKDK

SEQ ID NO: 228 - protein, 222 aa, Moraxella catarrhalis
MAQRPQKQPSAVYKDEVHNQRVGLSSLLWIVVGLLVAAMLAVFLYVSPLFDGFGQSADPKPDALVKPITASEPEIEFEFYEVLPEQKFQSIPEGVSIQDREDNTLPKPSTDVIINHSTKASTDQPADISIAAENTADDEPNHQSQYILQIKSYEKAKDADLKRAEVLMAGVDAIVVRQDTKNGYVYQVISTPMTQKEASATSVRLRNNGIDSLLIEQRPTPK

SEQ ID NO: 229 - protein, 485 aa, Moraxella catarrhalis
MYSIHQNTLRNIMKLHTSALVLAMSGIMLSQTAFSNDSPNLSNSAFQQCLSTLKNSSTFRSVSGVTFEKYRPSQPDPSVIRSLNYQPEFKKDVWDYLASLVDSERVQDGIRAKHEQADVLRRIESRYGVKPEHVLGVWGVESNFGQTLGKKNLFDSLATLSCFDRRQSYFRGEYANALKIVQNGDIRPEDMTGSWAGAFGQTQFMPSTFLELAVDFDGDGRKDLVNSKADALASTANFLVKRGYRLGEPWGYEVRLNGYNGSSGRRNKQSINHWRAQGITLPNGQPIPNNMASAGLLLPAGRQGPAFLVGKNFDTFYSYNASESYALAIAQLSDLVRDENTNTNFATPWPTDDPGIGRRESKEIQQALINAGYDIGAVDGIIGDNTRQAIMDYQRKVGVMPDGRAGQKFHRLITGRTASIQSAQTPAQSINTPTTQYHSVQPTVSTQANAARAVIVKPANTPPTTGTTYRRVINADGSSSWILVK

SEQ ID NO: 230 - protein, 102 aa, Moraxella catarrhalis
MLPFSLVNIYTRSSLASTVIGASRSFQSGISSSSARVSITAPDRVCAPNSEPFSMTQTVNSSIPAAIANWRKRIAADRPAGPPPTMITSNSIESRSICMNYP

SEQ ID NO: 231 - protein, 190 aa, Moraxella catarrhalis
MKKIAFAALSVSVLLLSACTNIQPSTQTPTTLPTADTPLKFAVTGKIGVVTTTPEGRQAGSAFYTWTQEDDRFAIELTGMLGIGATQIRYNGTTAALDSERTGTITADTPEALLLTATGWQAPISQLPHWILGRGAPDDSTAGYDHLGRLVSAANGAWHAQFDYDKTSLPSRLRITHTNQHSITMTVTHQ

SEQ ID NO: 232 - protein, 317 aa, Moraxella catarrhalis
MSYMAVFSGSANPKLAQTVADNLHIPLGKADINRFSDGEIAVEIKENVRGKDVFILQPTCAPTNDHLMEVILLADALRRSSAGRITAVIPYFGYARQDRRPRSARVPISAKVVADMLSIAGIDRIMMVDLHADQIQGFFDVPVDNLYGTPVLLRDLKQQNYENLMVVSPDVGGVVRARAMAKLLGDADLAIIDKRRARANESQVMHIIGDVSGRDCVIVDDIVDTAGTLCKAAQALKDHGARRVVGYITHPVLSGKAIETIQKSALDELVVTDTIPLSEAASACANIRQISIASMIAESLRRINNEESISAMFEYDI

SEQ ID NO: 233 - protein, 182 aa, Moraxella catarrhalis
MVLGLALLLVHPNLQQSQNISRNNKNLYNTPTLKHKHFKSKPPPYKPKLPSLKCKLKKHKQMPAMKPRQLLPMVAVSVAYWQVLQQALRQVMLQAKLLVIVLLPLKLHKPPKHQQPHSNQHKITNKPPTAIAKASLKPPKTTELAPLAKVLVRQAVRQVRPHEAYHCCTTTRLAKRNGTHWL

SEQ ID NO: 234 - protein, 957 aa, Moraxella catarrhalis
MAQDKIAIRGARTHNLKNIDVDIPRDKFVVITGLSGSGKSSLAFDTLYAEGQRRYVESLSAYARQFLSQMQKPEVDSIDGLSPAIAIEQKSTNHNPRSTVGTITEVYDYLRLLFARVGVPYCPEHDEPMVAQTVSEMVDGIMSLPTETKLMILAPVVRERKGEHIALLEQLPSQGFTRVRIDGVIYETDELPNLEKNKKHSIEVVVDRFKVRDDLGNRVAESLEVALKLGNDIAILYHMDGNPVGDDEQILSAKHSCPVCDRAVSELEPRLFSFNNPAGACPACDGLGKRQYFAAERIVTHPEKSLNQGAIHGWDKRHAYYFGLLSTVCRHFGIDMDMPWQDLSNKHQAIILNGSGRQKIEFNFTDERGRKTTKNTPFEGILPYLERRYTTTTSNLVRDELAQYLSDTQCNVCHGVRLNDIARHVRVEDKAIGDIIHLPIGEAWQYYQNLKITGAKGEVADKIFKEIKERLGFLTKVGLEYLTLARSAETLSGGEAQRIRLASQIGAGLMGVMYVLDEPSIGLHQRDNDRLLSTLIQLRDLGNTVVVVEHDEDAIRQADYIIDIGVGAGVHGGRVVASGSAEQVANTTGSLTGEYLSGKRRIEVPTTRQLPKTIEIIKGKKTIQEPLLIHLEGATGNNLKNVHLSIPIGVMTCITGVSGSGKSTLINRTLMPLAATTLNNATTLAPEKYEKISGLEHLDKMVDIDQSPIGRTPRSNPATYTGVFTLIRDLFTQTPEARARGYKAGRFSFNVKGGRCEVCQGDGLIKVEMHFLPDMYVPCDVCHGKRYNRETLEVKYKGKSISDVLDMTVEEAMGFFEPIPAIHRRLEALHEVGLDYIRLGQSATTLSGGEAQRVKLAKELAKRDTGKTLYILDEPTTGLHFHDIAKLLHILHTLRDRGNTVVVIEHNLDVIKTADWIVDLGPEGGSGGGEIVATGTPETVAKNSRSHTGRFLKPMLK

SEQ ID NO: 235 - protein, 254 aa, Moraxella catarrhalis
MGFVINTWISYTVLLFKLAFLSHNDYNIKNLKNSIMIRLYLGGSFDPIHRAHLQMVLSAYDTIHQKTTDTVTVHLLPTAGNPFKNAPTSHAHRIVMLKLAITPLIKKGMNISIDERELSLIPPIYTIDTIRQLKSTYPDDRLIFIIGGDSLANLHQWRAYDELIYQVKLWAFDRVDTTPADETVATKCTTNLDEFLANDHTIYLDHTPIMNISSSQIRTLIADGRTKLAAPLMDECVLAYICKEGLYQNLKNML

SEQ ID NO: 236 - protein, 400 aa, Moraxella catarrhalis
MMNDQLLNFYAEQLSALKASHNHRQLQRLKHQGQRIGVNDSKPLLNLASNDYLGIASQASLYEEFLELLHEQRWPFSASSSRLLTGNFENFERLETKMASLFGRPCLLFNSGYHANIGILPAICDDKTVILADKLVHASIIDGMQLAAKHGTKTIRYQHQNLPQLEGLIQKYQSDNGICRIIVVTESIFSMDGDITNLSHLSHLKAQYPKVMLYVDEAHAIGVRGGRGLGCVEEYGVINQVDFIVGAFGKALASVGGYCICHPILRDYLINKMRPLIFSTALPPINIAWSCFILEQIPLMNQRRKHLMKLSDDLSKVVRLAKLPCPSASQIIPIILGDNTRTLNAAADLGRQGYHVLAVRPPTVPKGQSRLRICLNSAINDDTMIKFTQVLTQIVSSESK

SEQ ID NO: 237 - protein, 988 aa, Moraxella catarrhalis
MQINKAFGIKSAYGQLILLVFLPIVVLAFLGSYLVMSEVRRAILSEQDTMANAALVRYDAIVRPLLTDLQHRQNRLDERVAQMNEDEILIAITPHDTNLPNRAMARHAQDIPFFNTNWFVQLQQSRNQHVLRVAIMDGIGQVLFSTGMQTDLSWGDVDLQAKEIYRIPTAVGTAYGKSFIFDNERYWLLVDMDNTPLTITSYRVALALTAIGLTTILLLLLILNIYSKRWITPLYEMRLYLQRLNTDNLSRVPQLKTSGEFALLRDDFTRAVRRLHASFTELKNHADETEHDLQQAFDEMEMQNISIRNARDAAISTSQAKSAFLANISHELRTPLNSIDGFINLLARKGELTGEQNLYVQTIKKSSAHLLALVNDVLDFSKIEAGKLILDSHDFDLYDAVYDVVDMLSPAALEKRLRLAVLFYDDVPTRIIGDSLRVKQILTNLVGNAIKFTDMGSVVVRVSLAEKTGYLCIEVEDTGKGISESDKEQLFQSFGQGDLSVTRRYGGTGLGLVISKQLTQLMGGSIGFIDNRSENIANAGATFWFEMPMGVDEGSIDDALPKLAELLHTPMQLLVWINHAPALRVLKSSLVGTKVQLTIAIGLADLLEKLDKNEMDYDWVIVDNFGQDAAKDDVGAVLRQIRLRYDGKLASFGYQVGINEQLLLRYQTQALYEPMDKRQLYAMLLNQQNLSAIQSPRQAKFVGRRILAVDDHLPNLLVLDALLAELGVEVVTANSGFEAIERMTQSITGSTPPIDMIFMDVQMPRMSGLETSIEIRKIEQAHLSKPVPIIALTAHGLSDEKDQLVSSGLNDYVSKPIGEVQLVQTLQKWLGHDVVADKLNVLDMVESLPILDVPKNAVDAPEKLPVVDWGDALERSANKPKLAYRLLEMLIDGADSERQSLERAWADRDRVSLADISHRMVGAARYAGVPRLRAVSEIFESACRNDITAVTPSHFIALRPAYRALIDALDTLQAVELDKVAMDADLAD

SEQ ID NO: 238 - protein, 577 aa, Moraxella catarrhalis
MTESTTQTTDSTTENFVPQFSDLGLNKPILKALTKSGYTTPTPIQAKAIPHALNGRDLLLSAQTGSGKTAAFVLPVLDKMSRKPTIEKHVQALILTPTRELALQVQDSVRRYGDGMRNMFSVPLVGGAPYGGQLRALKKGVQVIIATPGRLIDHMREGRVDLSKLDMLILDEADRMLDMGFADDIKEILQNTPQTRQTVMSSATWDGAVGKIAESFTVNPEKVSIKVESAHIDESVYYCDDFNHKNNILLQVLNNPKIKQAVIFAATKMSTEKLAAQLVEAGFKARYLHGDLPQGKRNRIVSDMKSGKCDLLVATDVAARGIDISAISHVINYDLPRQVEDYVHRIGRCGRAGRTGVAVNLCSIDDNRQLEHINRYLKRQMSVSTIEGLEPRRNFGIQSQERRRGRSKSQNRTRQDGRQNFERTDHKFGSRNRHEHRHERSFEGKRERFEDRERSVNRRENDENHERRHSRSDRRFDKNRQGYYQADGTARQDKKAYTRNFDRRDNDRNDTRFDKPTKKFGTQTDFDRPRRNKAFGDKVKPNTGFDKFGGKSRPKAVEEIFFAKRQDKKAKRRFGEF

SEQ ID NO: 239 - protein, 302 aa, Moraxella catarrhalis
MPELPEVETTKLSLEPLIGQTVTCVQVRHPRLRYDIAKDLDSLVGFVLTKLQRRAKYLLLDFYHAHDSRQKTLLIHLGMSGSLQQHINEPPRKHDHVLIDFADSHGKIITLHYHDPRRFGMILWVVNDDYIDQPNTYARFLAHLGPEPLSEDFDANYLIRYIMRPKSHQKPLNKPIKSLIMDQSVVVGVGNIYAAESLFLSGIHPLTPAYLVHEDKLVRLTHHIKQILARAITQGGSTLRDFTVGSGKTGYFQQTLLVYGRQGESCATCGSLLENIKISGRASVYCPNCQPYHDHNNPSSNN

SEQ ID NO: 240 - protein, 798 aa, Moraxella catarrhalis
MKISENWLRQWANPSINSELLGEQLTMAGLELDGVETVAPPFNGVVIGVVTECQQHPDADRLRVTKVDIGSGEHLQIVCGAPNVCVGLKVAVATIGAVLPSDDNKGFKIKKGKLRGVESQGMLCGASELGLEDEIDGLMELPKDAPIGMDVRDYLNLDAKIFEIAITPNRGDCLSVLGLAREIAAINQMPLNRPVIQPTKVVTDTAPSVQVLDAKACPRYLAQRIDDIDRTWPTPQWMTDALIASGVRSHNFLVDVTNFVLLELGQPLHAFDADKIQGDIIVRMAHSGETLELLNEQIITLSGDELVIADDAGVLALAGIMGGARSAVSDETTSIILESAHFDRLTISGRARRFGLHTDASQRFERGVDFALPKLAIDRAVGLIVSVAGGKVSQMTTAENLDALPVRHKIIVPVGKVSQLLGVDIPSDQMVDMLNRLEIVTTMQQDSLVCQVPSHRFDLTIYQDIVEEIARMYGYANICATLPELSVDMRYDDTADLVQLVKRSLASSGYYEAVSFSFSDAKIEALFDDQSLGAVLPLANPISSDLAVMRRTLMSSLLPIVSYNLNRQQPRVRLFETGLSFVGGDVEHVVQTPSLAMIATGELTTEQSHGTRKMDFYDLKRDIESLLPNTLDKSKVTYERTTLTFLHPGQSAHLMIDGEDLGFFGQLHPSICKALDLPTVWVAQMDLDKLIALNRKSSPIIAPSKFPSVRRDLAVLVDQDVAWQALEKDIRKAAGKYLQDVWLFDIYVGETLPKGKKSLAFAMVFQDQNATLEDEQIKAAVDKVIQNLADKHAAHLRD

SEQ ID NO: 241 - protein, 278 aa, Moraxella catarrhalis
MRLTHTNTLTHLTAWDNVISSLVVALAAFVLSPQPIAHAKTDTNAMASIKGGTYRPLYLSEDSPMVTVGNFHIDKTPITNQQFAKFVANNPKWQKQNIAKLFAEPDYLAHWQKTSKGYYPNSADIDKPVVNVSWYAANAYCKAQGKRLPKIAEWEYVAQASTTRINGSQEKGYNQTILDWYTKSATMPLKRVAQSPANYWGVYDMHGLIWEWTQDFNSNLVSGESRADSTLNQTMFCGSGAAGAPDPSDYAAFMRYGFRSSLQSQFALKSLGFRCAKD

SEQ ID NO: 242 - protein, 771 aa, Moraxella catarrhalis
MFHPPNDTMRSMAMGEYKKHWWGLVITLIIAFILLGWGGFEIYRTTPPIPDKFVDSSGQTLITKQDILDGQSAWQSTGGMQLGSVYGHGAYQAPDWTADWLHRELVAWLNIKAQADHGKAFDELTSIEKMGLQQQLKEEYRGSSMGSDNTVMLSDTRIAAINQVAPYYIDLYGDTPELASSRESFAMKNNTLPDLTARQNLAHFYFWTAWTSSANRPGTVATYTNNWPHEPLIDNVPTAENVMWSIASVVFLLAGIGLLIWGWAFLHKQEEDDIKVTVPKQDPLSLIELTPSQKALAKYAFLVVALFVVQIFLGGFVAHYTIEGQDFYGIPVSDFIPYSLARTWHIQSALFWIATAFLAIGLFVTPIIHGGKDPKYQKLGVDLLWVALIIVVVGSYIGQYLAIAHIMPAHLNFWFGHQGYEFIDLGRFWQILKWVGVLFWLVLMLRGVLAGFKGEGDKNLLFIFVASVVCVGLFYGSGLFYGEHTPIAIMEYWRWWVVHLWVEGFFEVFATVSIAFIFYNLGLVSKKIATGSSIASAALFLLGGVPGTFHHLYFTGTTTPIMAIGASFSALEVVPLIVLGYEGYEHWSMQRHAKWMERLKWPVLCFVAVAFWNMLGAGVFGFMINPPISLFYLQGLNTTPVHAHAALFGVYGFLALGFVLLIVRYLRPEYRFSDKLMKTGFWGLNLGLLLMIFTSLLPIGIYQAYASITEGLWYARSEGFLQQDFLETLRWVRTFGDVVFIIGGVSIALQVVKLVFGQSPKHPKHDTPITD

SEQ ID NO: 243 - protein, 583 aa, Moraxella catarrhalis
MSVKYRLCFGFYMTYNLTKSPMTPSKPSQDSANYLFLVLPRFALLWVCVALIPVSILFHIWWLLFIATCLTCLGVYNISQKRHAILRNYPISGHIRFLFENFRPEVRQYFIEGDREEVPFSRMQRSIVYQRAKDVDSTTAFGSLNDLTKPGTDWFLHSGRSHTIKNHDFRVRVGNERCRQPYDLSVFNISAMSFGALSAAAIESLNKGAKEGGFAHDTGEGSISPYHQKYGGDLIWQLGTAYFGCRDDKGRFNPETFRQRAVLSQVKMIEIKLSQGAKPGKGGVLPASKITTEIALTRDIPMGIDCISPPTHPEFSTPTELVHFWQRLRELSGGKPVGFKLCIGMPWEFMAIVKAMIKEDNYPDFIVIDGAEGGTGAAPIEFMDSVGMPLVDALIFVQNTLVGAGIRDKIKVGVSGKVISGFDIARLMSLGADWCNSARGFMFAVGCIQSRSCHTNKCPTGVATQDPARQKAIDIPDKSRRVSNFHKNTLKALAEIVGCAGLSHPTELKPHHIVRRQPDGWIKLLSEHYQFIETGSLLTGDCGRRVLDDMWKLADPNSFQAMTIADKIVGAENKRNRTIESLY

SEQ ID NO: 244 - protein, 495 aa, Moraxella catarrhalis
MMYNDHQKPTPTKEQLAALDMAKTGQSFKIVAYAGAGKTTTLKLISENLRGRGLYLAFNKAIAHDAQNKFPPNIRCQTFHSLAFRHVNRDVTAKISLPRLTPSRLANELGLRAISTERVIDGIKKPVTLTPAKLANIVSEAITTFCKTSSAYPAPRHITAPNWMSDTDAKMLQQTLYPAFEQRWLQSIDPRHQAGISHDIYLKLWTLSDPIIPADFILFDEAQDADPLMMGALIRQDKQTIYVGDAHQQIYEWRGALNAMKRLPYPQTLLTQSFRFGEPIARIANVFLKALNENIPLKGNPNQSSILAKSLVHGAKDAILCRTNATAMSHLLDGLKLGHKVALQADSHRILRFCQGADSLRNGKSASGIPELAYFNHWQEVQEFSETGEGGDLKTWVKLIEEHGTTTITKAINSLTMPSHADYVVSTAHKSKGLEWNRVQISDDFLYDINSLAVKITPEELRLLYVACTRGKNLLDIHHISDLLHALQHKKLILG

SEQ ID NO: 245 - protein, 323 aa, Moraxella catarrhalis
MQKTHLFNNPVRLLAPMEGLTDPLMRRVLTQIAYDLGSPYDWAVSEFIRVTHYPLPAHVFYKYVPELHTKGCTASGTPVHVQLLGNNPETMAASALVAVSLGAKAIDLNFGCPAKTVNNHKGGSVLLEEPKTLYTIIRTVRDAIPTQIPVSAKIRLGYTDTSQSAEIGHAVADARADWLTVHARTKVDGYKPPAYWEKIAPFNDLGLPIIANGEIWNAEHARRCIAQSQTHHLMLGRGAVTRPDLTAIIAGKSDLGWADLCQHQLSFINDITDNQNGLIGRYKQWLAMLTKGYTQAHQLWQAVKKLKNKSDIEQLIIQSTHHH

SEQ ID NO: 246 - protein, 1314 aa, Moraxella catarrhalis
MMSTIAGLEFLTDFQAQKLADQLKQKAGLNIYTLSSQQVYVFDTPLSESDHQKAIDLLNQGQTPSLNTADDAQIQVVVAPRFGTISPWASKATDIFNNCGVTIGRVERVIVYTLTGENLPKRLPAIAESILHDRMTQSLVYELSDVSVLFVDGEPAHLSVVDILGMGKDALVQANAEYGFALSDQDMTYLVENFTKLGRNPTDVELMMFAQANSEHCRHKIFNAEWTVDGEVQPKSLFKMIRNTHEQNPEGILSAYKDNAAVMEGFVAERFYPTKTTEGNAQYGFHQEQIDILMKVETHNHPTAIAPFAGAATGAGGEIRDEGATGRGGKPKAGLTGFSVSHLHLPTMPEKWETTGQVSAVSYGKPSRMASALDIMIEGPLGGAAFANEFGRPNLNGYFRTFQLDISDHQDGSQMRGYHKPIMIAGGYGNIKRDLVQKNAIQEGDLLIVLGGPAMQIGLGGGAASSVDSGKLDEGLDFASVQRDNAEMERRCQEVIDTCWAMTKDGMDANPIISIHDVGAGGLSNAMPELVDDHELGAHLNLRKVPSLEAGMSPMAIWSNEAQERYVLAIRPESEALFDSICSRERCPYAILGTATTVRQLIVDDSLLPERPVDMPMQVLLGGTPKMKRSFNRTEFALKPLDTASVNIKDSIKDVLRHPTVASKSFLISIGDRSITGMVTQDQYVGRYQVPVADCAVTSTALNAITGEAMAMGERAPVALINPAASARLAVAEAVTNIASARIDKISDITLSANWMAACGDEKEDAALFDAVHAVGEELCPALGIAIPVGKDSLSMKAVWSEDGVEKSVTSPMSLIITAFAPVQDVSGTLTAALNNTDSALYRIDLSSGKLRLGGSILAQTLNQLGCDCPDLERPEDLANFFAFIQAAAKAGVIQAYHDIGDGGLIASVAEMQFASRMAITLALSDENLLGQLFAEELGAVVQVLPDDVPAFVDLAKTHGVSEFVSLIGQAKTTPAGGAGLDVLSITTPSQTLSFTRSELQKQWTKVSHAIQSLRDNPICADQEFALIDDINHHGLIADANYDLDLAVEAPYVNSRTTQPKVAILREQGVNGHLEMGAGFVRAGFDAIDVHMSDLMSGRINLRDFEGLVACGGFSYGDVLGAGSGWANSILFHDELRMQFARFFHRPETFALGVCNGCQMMSQLKDLMVGAESFPRFIANKSARFEARTVNVRIERTKSVLLKGMQDSILPVAIAHGEGYANLDDKSMADLTYHGQIALRYVDSQGNPTEHYPLNPNGSPQGITGICSNDGRVTLMMPHPERTLRAVNHSWKPDEWVNDGAWMRLFRNARAFLR

SEQ ID NO: 247 - protein, 471 aa, Moraxella catarrhalis
MTSLAKLDGEEVVAFSIIRSKGASETSVVAAVDDALADLQAQMTDLKIEKIVDYAAPIEESYQATMRMLIEGCILAVIVVFIFLRDWRATFVAATALPLSIIPTFFIMYLFGFSLNMISLLALTLVIGVLVDDAIVEIENIVRHLNMGKSPMQAAIEAADEIGLAVVATTFTLIAVFLPTAFMSGVVGQFFSQFGWTAVIAIFISLLVARLLTPMMAAYILRPSIYTQKPAGKLMTAYLQMVAWTLKHRTMTVAFASGFFIASLMLASFLPSAFIPPDEMNQTQVSIELTPDATFDDTLRIAQMAVNKVKAVKGVESVLLTVGSSHSSGDPSSMRSASVNTAKLDVKLAERTMRATKTQIESDINQALLAVPAARFNVGMSAGGGEAGYVFSITGADAKKLDATAHEIIRQIRVLPMVASVINNNAFPRPELSVIPDELSMADKGVTTADLVNTLRVATQGDYDNALQSLA

SEQ ID NO: 248 - protein, 702 aa, Moraxella catarrhalis
MDKFMTKPVMTIHLPVTALSGVGQALAGRLAELGIHRIFDMLLHLPRDYEDRSRVIAIKDVSHGMSVLVAGVVTWVEKNRTGLSVTLEDATGEITLRFFHTYPSLLTTMMVGAKITVFGEIKVSRYGTQMSHPDYHLTGTKKFESGLLPIYPTIKGINQNKLRQLVRLALTAVQQDGIHGLSETQLKAAGVELTGDLLPALKAVHLPEIHADIFSQTALLAGLKDRTHPACRRIIIEELVAHQVSFLFRRNHIYQYKAPKCDPISPLAKQLVAGLPFELTAAQKRVIDEAVSDMATSRPMLRLIQGDVGAGKTLVAAMTACYALDSGWQVAVMAPTEILAEQHLINFQKWFEPLGIGVGWLAGKQTAKERTAALDAIRKNQVQIVVGTHALFSDTVVFAKLGLVIIDEQHRFGVEQRLRLTNKGVSGGAPHQLAMTATPIPRTLAMSMYGDMDVSIIDELPPKRTPITTVTINRDRRDEVIERIQNNCQAGKQAYWVCPLVEESSALDVQSAQLTYEDLSDRLDIRTGLIHGKMKAADKQAVMQAFKAGDIDLLIATTVIEVGVDVPNASLMVIENAERLGLSQLHQLRGRVGRGSAKSFCVLLYQLPLSPTGIERLNVLKDSTDGFVIAQKDLELRGAGELLGKRQTGDMGYYLADIVRDEALLEAAGDIACQLIKTSDKLPTALAIMNTWLPESKDYVNV

SEQ ID NO: 249 - protein, 88 aa, Moraxella catarrhalis
MAQHALYHQPKRCLIRYDLDSHENHLFCRHQHATHTALANETLPYPSKPLPPQANSPISQVMYHLDTMVYFGSYGRYYHHLGQKQAQI

SEQ ID NO: 250 - protein, 390 aa, Moraxella catarrhalis
MTTLSPKDVVIVDGVRTAMGKTKNGMFRHVRADDLSAKLIQALIARNDIDPSELEDVIWGCVNQTLEQGWNIARYAALLAGVPKTVAAQTVNRLCGSSMQALHTAAAQIMTNQGDMFIIGGVEHMGHVSMMHGVDPNPKASKHYAKASNMMGLTAEMLGRLNGITREEQDTFGVHSHKKAWAATQAGRFDNEIVGVEGHDSEGNLQLCTVDEVIRPDANLEAFQALRPVFDPKNGTVTAGTASALSDGASAMLIMSAQKAKDLGLKPRARIRGMAVAGCDAAIMGYGPVPATQKSLKRAGLNLSDIQTIELNEAFAAQGLSVLKGLDLLDKQDIVNHNGGAIALGHPLGCSGARITTTLLNVMEQQDTQLGLATMCIGLGQGISTIIERI

SEQ ID NO: 251 - protein, 895 aa, Moraxella catarrhalis
MKLNKLAAIISAGISCAYLTQCTSVHQMATFGTKTIDNEAALQDTKPPTNGVYTYPVTRIHQDSTDYFLSGEYGRSADHVRSEGEFGDSSAYPRPDDGVSRYFGEKIVDKFRWLENVDDMNKDYTQETDEDRDRNLIGSLLENDVKDGLFDNRTRKDLQTVKPKQSSEVNDWVNAQNEVTNQYFDANPIYEQVKNNINALMSYRYSYRKENKDGVGSLELYRHEDGYIRLELTDTDGNKRTLFNERELSEDGNTVLPWPDIYVSDKGSYVAYVTAPGNNDTDTRGRTDLHVIDIKTGKAAIEPIQNADNNSIIWLDDKSFLYIQGSQIKRHEVGSKKWVDPIEVTWGEIDGAGPTDMWYSDDETRRYLVIEAYKKAPTSFIKDTKTNKVYRIHSEKFFNDFFYHAPDYTHAPLASLVHFDDKTLDVYFISGEKNIKGDIFKMNLNNPKKREIVVAIPDEYDETLEAIYHPEAGGHFLIKYLKDGAHKLILTDTTGKIVKDLTPDIPGNADDLTSYVAEDDNKDGDKKAKDKEVADEDDQTPDESYVSFRFNAIIKPRTVYKYSPSKGEFIDVRRRDLIPFDENLYESKQILYTSKDGTKVPMNINYKKGIKLDGKNPTVLYGYGGFGATENLAFHKSKAAWLEHGGVWATAFIRGGSEYGHTWHKDGRLLNKMNVFDDFAAAADYLAQSGYADSNHLAISGASNGGLLVGASMVLHPEKFRVAIPAAGVLDMLRYNDNFHTQYWAGEYGLPYDSVAQYKLLKSYSPYHNVKAGVCYPSTLVMTSKRDDRVTPSHSYKFVAALQDKQVCANPTFLYAAEQFGHWANTYQEQKNDYSLFTSFALNEMNIKHVPDLTHRHDADFYKTDKWREEEAKEHAKQIKKLQQRIDKLNETKDK

SEQ ID NO: 252 - protein, 405 aa, Moraxella catarrhalis
MKKTSTQLGLLAVSVSLIMASLPAHAVYLDRNLRDGLKFGISGSVNPSLSVNSSTFTYLGDSSVYGNNATLERMLQDQDRQDSDERARLNGFGGASVYLGAQKYLTRDITLFGNVGLYAPASKGQRAAYGYGVNLATKYGSIGINTDNEFSAGAGTPSGIYNLVDGSNEYSTAISVSTSYIPKFKFTAYHALPGSPDTRSVSSHENYYIQKAQGLSASYSHPISPNQTLSIGTAYSKSQRHKDFFSDTAYNNKTASTVGLSYRQGDWSVSGNVGQAKENLHGAIIDDITTKAFGTKISYKVTPRISVSGTYGQKTTDKNTKPNKRLDIPNIIAQRGGNISSRVHESWFFDKTKQKTYGLSASYYIYGGISISASMNQTRTTNFTEEGAYSQRKNNSYRISTGFSF

SEQ ID NO: 253 - protein, 913 aa, Moraxella catarrhalis
MIKKPLVCAISATFAMPAVADNTKLGEEPTTTLKGVLVSSQTNQNTGFVSNDSKQSSDLTLSKDKLKYRSATLGNALSGELGIHSNPFGGGSSAPVVRGQEGVRLKILQNGTDVIDVSSISPDHVVATDTLLASKVELVRGADTLLYGLASPAGVINVVDDRIPNRMPSGAIHDKIEGETMLRYNTNNHEKLATAGVSFGVGDRIAVRVEGLKREADDYQVPHFQADRMLDYVPGSANNSTVGMIGVSYIHDNGHIGASYSHRKDRYGIPGHIHCDSQREHFIKWHNITKSNYYLPIYPHLMEDSDIDDNPHTHCRHNHEDHIGEHNPTGVPINHEHHSPWIDMKTNRYDIRGEVYRPIQGLDKIKLSLTYADYYHDEKDAGNEQDPNNHKPSERDTTVDKGHASSIFTKKGVNGRLELYHTPTKRLSGVLGIGYQTQKSAAGEAYLPSYFQSEAEWQKAQSQNINQYRPYLLVPNTNKSLGIFGLEQLKLNQMTFKVAMRHERQKTPIEYDQHLLDHALQYFLSKAQLKAPDHPDLTTYKQHATSYAGSALWDITPNHRLSLTYSHNERIPSPMELYYQGGHLATSSFEHGNKNLVKEKSDNYELGFMHTADKVSYKASTYYSNFDNYIFNETVAKEGNLYIRRYNQTTAKFYGVEGSLTYQPNANHSVMFFGDMVQGKIGALSDIKGKLVYAGRKWVYFDDDIKDMTVDDNGDYDADGGLTCALKTPEQWGQINDNNDCSTTINVYKNGTTTSGEEDYDRLARNPTYAPRVPPSRLGIRWQGHFGDHWSANAEFNHVFAQNKVATSTVAIKPQFKQPEGCQRHESHCRISDYGSDNNPLMMQPRYITENKTAGYNLLNVGLDYNNAYRNVDYTLSIRANNLLNEQIYIHNSFLPFVPQMGRNLTLGLTAKF

SEQ ID NO: 254 - protein, 951 aa, Moraxella catarrhalis
MTNSSKDTVAFANTELAADSAAYVEALYEQYMADSQSVSKEWQDYFATYRQDDDAPHNAIKEQFLLLARNQSGLTAKSSDSSVEHHPKQMAVQALISAYRRRGHRKANLDPLGLHPRPEVEDLTLAFHGLAESDLDTTFPTNDLAIGKSEAKLREIIEILERVYCQSIGYEYMHVFQGVEKRWIENYIESNHGHIKFDKDKKLEILERLTAAEGLEKYLARKYTGVKRFGLEGGESFIPAVHEMVQRAGTHGSKEVVIGMAHRGRLNLLVNILGKKPSDLFDEFDGKVQPVNGSGDVKYHNGFSSNVMTPGGEMHLALAFNPSHLEIVSPVLQGSVRARQARRSEKYGLQIDNSTVLPLVVHGDAALAGQGVNQETFQMSQTRAYKTGGTVHIVINNQVGFTTSRIEDARSTEYCTDVAKMVHAPILHVNGDDPEAVVFASQLAVDYRREFGKDVMLDIFCYRRNGHNESDEPSATQPLMYAVIKKLPTTRAQYVEQLVQEGIITHEQGAKLEDDYRELLDRGEFVAGGLVSEPNTELFVDWKPYLGHDLQDDWETGVDIEKLKSYGRAMAKIPEGFTLQRQVAKVVEQRLAMQTGEEPLNWGAAETLAYASLAAEGSLVRITGEDVGRGTFSHRHSELYNMNDGSMYIPLQHITKDQARFATYNSLLSEEAVLAFEYGYATTVPNALIIWEAQFGDFVNGAQVVIDQFISSGETKWQRVCGLTMLLPHGFEGQGPEHSSARLERFLQLCAEDNMQVITPTTPAQIFHALRRQVVRPIRKPLIVMSPKSLLRHPLATSNLEELASGKFETVLPEIDSINHEQVTRLVLCGGKVYYDLLDQRRKLGQEHIAIVRIEQLYPLPEERILAEIDKYPNLEEIMWAQEEPLNQGAWYYLAPELFRMVVPAPTKAKIITPSARPAAAAPATGSPKLHTEQQKALIAEALGVTVEALK

SEQ ID NO: 255 - protein, 623 aa, Moraxella catarrhalis
MQSLGINMATNQDNTINNIPTLNFDAVIVGGGGSGMRASLQLVNGGMKVAVITKVFPTRSHTVAAQGGIGASLGNMSPDNWHFHFYDTVKGSDWLGDQDAIEYMCREAPKVVYELEHMGMPFDRNADGTIYQRPFGGHSSNYGEKPVPRACAAADRTGHALLHTLYQKNLEKGTQFFVEWIALDLIKDDEGNINGVIALDQETGNISVFQANTTVLATGGAGRIFKASTNAYINTGDGLGMAVRAGIPLQDMEFWQFHPTGVAGAGVLLTEGCRGEGAILRNKHGEAFMERYAPTLKDLAPRDFVSRSMDQEIKEGRGCGPNGDYIVMDMTHLGAATLMKRLPSVFEISKNFGNVDITKEPVPVVPTIHYMMGGIPTNIHGQVTVPNLEGPVDEQGLYTEGRIVKGLYAIGECACVSVHGANRLGTNSLLDLVVFGRAAGQHIIDEFNQTGRNYKPLNPRVLDFTQSRLDKLQNSTEGYNAQEVADEIRNTMQSHAGVFRTQALMDEGVQKIMALAPKVEQIHLADKSAVFNTARIEALEVANLYEVAKATMISASLRHECRGAHMVVDYEHPADYEPAPLGRNDSEWMKHTLWYSEGNKVVYKPVRKQPLTVDYCVPRVRTF

SEQ ID NO: 256 - protein, 258 aa, Moraxella catarrhalis
MLHTNTGPTQKHGFIIIRSITTKEPDMIINKPLLAIAFATALSACSQPTAGTEQTAALSTQNAQETQHAAHAHHDTSMPMAAHTSEYMQSMNTMHDAMMAAATKAHADVAFVEGMIPHHQGAIQMAQIELKYGKDAAMRKLAQDIIDTQQTEIEFMQNWLTTAQDKDAIDANSEHAKAYLSDMSIHDAMMTGVHHEDADIAFAQGMIPHHQGAIQMAQIELKYGKDAAMRKLAQDIIDAQNPEIALMKQWLGSRGISQ

SEQ ID NO: 257 - protein, 808 aa, Moraxella catarrhalis
MKVGIIGKHFLPIGVIKRILMTNTTTDTDIQIDHQAIYAKLAATHAIKSTQVEAFARLYDEGASVPFIARYRKEHTGGLDDEILRELEKSLIIERDLAARRQKILGLLAAQNVMTDELAERVNTASTKLELEEIYQPYRPRRRSVAARAKLAGLEPIAHAVLAGQSPAEALEGYVSPETLTDDKGETFEADFGDFDKQIVGIQAIILDEWATALDLLDKVRTGFNATASIRSELIGEEKREVGEKFKDYFEHTEPFAKLSNHRLLAMLRGRQQNVLVLHVDGEDEPFIEMIMRHFEIDSKAANGEFLTETAKKLWLVKWRSQIEHRLLTERRLAAEADAIAVFAENLKHLLMVAPTGRKAILGVDPGYSHGVKMAVIDGMGEVLATDTVYPFKPHHKLAEAKDRIETLIKTHQVELVAIGNGTASRESEELVKSIIREASLSTQALVVSEAGASVYSASEIASQELPDLDVSVRGAVSIARRLQDPLSELVKVEPKAIGVGQYQHDVNQTELESSLDKVTEDCVNAVGVDVNTASPAILAHISGLNKNVAQQIVEYRRAHGAFTNREALKNVPRLGVKTFEQAAGFLRIKEGDEPLDATGVHPESYGLVYEILTQHGKSLDEVLGNESLTKALNDSSDNFSQLATVLNELAKPAHDPRGEFRTAKFRDDVNEIKDLKVGMTLEGVVTNVTAFGCFVDVGVHQDGLVHISELSDGFVANPADVVKPQDIVTVRVISVDEVRGRIGFSMKSEKSAKANQSAKADKADKSANHKPKADRKPARQDKPKSTAKPAKTMGSFGVLLQQAGLGK

SEQ ID NO: 258 - protein, 344 aa, Moraxella catarrhalis
MRLINFKLVCTMMKMIFRGTLAIMLFVSSFSTLALANSPETHTTQIQTRLASAGLATPVVKVTQSAVPKLWQITLADGNHLLISEDLDYIIQGKPSANPSPATPIDAATQTALPIGTPITPEHRTALLKNMSAMHDMTEAVFYHTGIQGVLWGISGQGDTTFLISSDGRYLMDGAMASIKNAQFSEYGLVFEAAKNRHILGELSDKDLVIYPSKTREKSVLYIASDINCPYCKILHERIDELNLHGVTIKIIGYPIYDESRLPMNHIWCTTDNAKRAALLSAAMKGIIPNSQAQCQHNPNPLSAIQKQVMPLAIMGTPAVFDAQGREFTGDLSNHEIYQFLNLR

SEQ ID NO: 259 - protein, 265 aa, Moraxella catarrhalis
MNKLKIGIMGASGRMGRMLIESTMNHPNTELGGAYVRSTSSLIGVDAGEFIGGKKSGVALSTLDGSQVDVMIDFSLPEAFDEALNQCVTHKIPLVMGVTGLSDDQEAKLQDAAKHIAIVYAGNYSTGVNLSLNLLATTARVLGLDADVEIIEHHHKHKIDAPSGTALMMAQAITEARGQNITNAAIYGRKGAAKRQRGDIGIHALRGGEIVGEHTVEFMMDGEIIQITHKAQNRATFATGALRAALWAAQQPAGLYDMQDVLELK

SEQ ID NO: 260 - protein, 558 aa, Moraxella catarrhalis
MPSFWWHDCKLCTNNFANKDAWTYNILIVLLIWHLIINQVSAMTSTFTLPFWFKPSLVAGMQRGIEKEGLRMQPDGYSAKTFHPAKLGSKLTHPYITTDYSENLLELITKPMPSIKQALDMLRDLHVLVHRSLENDELMWPLSMPCMTSDTDSDIPLADYGSSNIGKLKTLYRSGLGVRYGRKMQTIAGLHYNLSVGDDLFGVWQHAEGAKDLTAFKNDKYLALIRNFKRLTPLVLYLLGASPAVCGTFVSGRQHNLIPLGTTCSYHQPNGTSLRMGKLGYTNSAQEDLDIRYNHLDEYIKGLQAAIGTPYADFEAIGVDDAHGVPIQINNHILQIENEYYSPIRPKQTATASETPTQALQARGIAYVEFRAIDLDPYSDIGITSVTACFLEILALYCLFTDSPYLMPEEEKRLNQNIDIVVNHGRQAGIAIDTDFGKENLHDWIIHHLTQMQTIADAFDAHHGSNQYRTALTMMQGKAINPDFTLSAQIIADSHRVGGTWALGKLLAQKHQTELLSHTLSRVDEAEFDELARTSLIEQAQLEATDTIGFYDYLKAYR

SEQ ID NO: 261 - protein, 460 aa, Moraxella catarrhalis
MHIHILGICGTFMGSLALLARDLGHTVTGSDANIYPPMSTQLADAGVEVWEGYHAEHLIPTPDLIVVGNACKRGMPAIEYMLNERLPYTSGPQFLYETVLKDRHVLAVAGTHGKTTTTTMLAWILQFSGIDTGFLIGGVPLVNTDDRRLSLAFQHSSYLGKQFFVIEADEYDSAFFDKRSKFVHYRPTTAILNNLEYDHADIFADLDAIQTQFHHMIRMIPSKGQIIIPANTPSLETTLDKGVWTTVVRTSLNGDAEWQAKLDANDGSSFWVHHNNTSAMVRWSMSGLHNVNNALTAIAAAHHVGVSVKMACTALSHFGGIKRRMELIGDVDDILVFDDFAHHPTAISTTLDGAKKRLTPRRIWAIIEPRSNTMKLGSHRPHLAASAAIADQVIWYEPQGLTWGLKEAIGSTPNQRVLDSINAIIEHIKTYAKAGDAIIIMSNGDFENIHGRLLDALSQP

SEQ ID NO: 262 - protein, 406 aa, Moraxella catarrhalis
MMKFYIAKTHIFLALMVGLSSMAWANPAATLTGFAKLDVETYAAGPISGRAAKTANGIVVPFKAQPVQGFSGALKNHDSSYTVLADNGYGTKDNSADFLLRIYHLDVDFRSKEGGGGEVKVLDFIQLRDPNKLIPFEIVNENSADRLLTGADFDPESIQRTSDGSYWIGEEFGPFLLHFNKEGVLIDAPIALPHPNQKNQQLRSPQNPLNTNYSSPTTVQRSGGFEGMALSSDGKFLYPMLEKPLTDASTKQLLISEFDVQKKAYTGNHYWFVLDERATAIGDFQMIDNRSGIVIERDDTENDWNGYKKLIRITLGRSGQAVDRTDLVDLMNIDNPDHLYGPVRAGDMGVGQRFTFPFFTIEDIIIEDDRTITVFNDNNFPGSSGRNANLADDNEIIRLNLHQPLR

SEQ ID NO: 263 - protein, 471 aa, Moraxella catarrhalis
MQYISTRGKTQPMQFSDVLLMGLAPDGGLMLPETYPSIDEATLQKWRNLSYSELAFEIMSLFVTDIPADDLKNIINKTYTKAAFGSEDITPVTRLYDRLALLELSNGPTLAFKDIAMQFLGNAFEYVLKQKNERLTVIGATSGDTGSAAEYALRGKDNIEVFMMSPEGKMSAFQRAQMYSLDDANIHNIAVEGMFDDCQDIVKALQEDAKFKAKYSLGTVNSINWGRILAQIVYYFKGYFGATTDNAQKISFCVPSGNFGNICAGHIARQMGLPIDRLIVATNENDVLNEFFNTGKYTPRTSVETYVTSSPSMDISKASNFERFVFLLLDKDSVQVAKLFGDVKSGKGFDLSDNLKLVSEKFGFIAGKSTHQDRLATIKKVYDDTQRLIDPHTADGVKVAIELQKADEMILVAETALPAKFQETIVEAVGEMTLPRPEHTQGLEDKPQYVTVVPNDTKAVAALIEQYITAC

SEQ ID NO: 264 - protein, 355 aa, Moraxella catarrhalis
MSIHTTVARRPSWRGIFAGLLMGLVVSMIMLALALVLSSFLSLDLRGAGIAAGVYTAVTALISAFVAGFFAVKASAPEALFGDGTDILPKDAALTGMLTAAAIVVISSVFAFNSVTGIVRTAGNAVGTTAGAIGGAASAVTSTVTTVAGAGATAAAGSSDAAGGDITAKAQELYQKATGNISRQDIEAWVAKNNETFDEAQISATVNVLEDMLHKTKADLNGMDFTNLDTWKNIDEYAKQRADEVQAIVTGDELIARLQAEGLTQEQALEVREETATAYHEYRASTEQAIADAKMNIEQTLQSAEDTARKAALYSGLFWLISTLLTFVASIMGAKTAAANYRLASPITVRERDLR

SEQ ID NO: 265 - protein, 568 aa, Moraxella catarrhalis
MLISLTFENLALIEQKHIDFDDRFNVITGETGAGKSLILDALSLCVGERADSSMVRHGCDEASVFGEFDISGNAQVIAWFEQHDRKLEDETLLIRRKISNQGRSKSWINGVPASISELKSLGSMLVNIHSQHAGLELLKPQFIVDWLDRIGGFGDLKAAAKTAFHHYQTLKRQADDARSQSAQRADRMALLSAKLTDIEPLLLVDFQEIEAEYDELSNLESLMREALEAAVQLDNDDDAPSVLSLLGRAMRICDNNAQSSKTFGECSQLLVLAQEQIIDAVAKLTDYAERELPDAARLDELNGLLSLAHRLSSKYHTPITELIADAVHWQDELDMLSSLPDNDTMDAKVLEAYQAYLVAADALDQARIQIAPDVCERLEARLVPLALPNARCQFSFNEKPVEHYTAQGKYDIALLFSANVGMPLQPLHKVASGGELSRMALTMQVMAADDGIGAHPTLVFDEVDVGISGGTAQVVGELLRTLGKQQQLLAITHQAQVAAAAHHHILVYKEHGEHTKSQIQVITDEAQIDELARMSGGVNITEATRAHVKSLLADIRHADKMAQRGMAT

SEQ ID NO: 266 - protein, 410 aa, Moraxella catarrhalis
MPNHTTTQMPKSSPSAKTSLLLLIIGLIFAAANMRSPLVMMGSIVPMLSDDFGLSSVQIGYLGAMPMPLFAFGSLMAAVLAKKFGLERMMIGMTLLLALGVAIRNWFGVIELYVGTLILSFAIGMLNALTAPFIKQYAPNNIALATGVFSLSMSTLAGFGAWMVVPFAKTFGWQFAMSSWAIFGVIAAWIWWLIYRHNRMDNLKLMPALPTIKPTAHLKKPINLWRQKAAWQMAVLLGLQSFLFYSLASFLPSIGMAFGVTLDEAIRLPFVFQVMAPLAILWLTWLSRCGTSFQIISVAGCLMNALGISGLLMMPSLMLFWSALMGFGCALVFTLSLMMFSLRTTSTETARDLSSMVQAVGYSIAMFGPLMIGKLYQWQGDWQLPLMVLVVLMIINIPFGLWAANETKIG

SEQ ID NO: 267 - protein, 112 aa, Moraxella catarrhalis
MKLNTLSAIALLFGGLLYAGFGYANPPKQCYADTKSAYQALISTQKSKRLNINTASQADFISLVGVGHKTAQAIVDYRHEHGKFDSVQSLMNVKGIGPAILNKNRHRLSVAN

SEQ ID NO: 268 - protein, 594 aa, Moraxella catarrhalis
MGKVPKKPKQTKKSICTTHSAKSLRLQKGSLPHSIVEVIGTLQKAGFDAYIVGGGVRDSLLGLAPKDFDAVTDARPHEIKAIFGGRCRIIGRRFQLAHVYSGREMIEVATFRAPPKDDTHTTDDGMIIRDNVWGDIEQDFARRDFSINALYYQPIKGEVLDFCGALKDIDSHTLRLLGDAKVRIEEDPVRLLRALRFKAKLGFEFDQDLANQFHQDNWTLLEQVSAHRLYDETQKMFGGGYLTPLLPLLFEHGAMSSLMSFAPNEPTPLMMVVARNTDRRIAADKSVNPVFFYAAMLWENYLYQLAKYKKRGLPFHEAQIKAAEKTIDAQRIKTAIPKFAEQFITDIWLLQPKLVNPRVRDIANLERLPKFRAAFDFLVLREGYDTHPLSEPTQNMGAWWQAYQDASAVDKAIMIEAFGTQAGTPKRRRDRNAKKDTKTRELEQLKELSLRSDDELIKTRPEPLFVVAGAEDLVKKTKARTKLPTPVFEPVNFTQADFEKLLANDEPYIPASRHRKRKPSSTLSIKEREQGLIKQSDEHWSGSKQSAQTKKPSRHQSKQVDGVTDIEPKLVENQAKPKRTRRRKSNAKPKADSI

SEQ ID NO: 269 - protein, 440 aa, Moraxella catarrhalis
MGVTVSLFQNFMIILVLILTSSFFSISEIALAGSRKIKLKLLAESGDDRAEKVLKLQENSADFFATSQIGLNAVAILGGSVGESALRPYFSEWIGLVYQGIWLDSIAFFSSFVLVTLLFILYADLIPKRIAMINPERVALVVINPILWTIRVVKPLAWIINTIADVTFRLFKFDTARDDSITFDDISAIVDAGAEAGVLMEQEQHFIENVFELEERTVPSSMTAREDVVYFALSESEESIRQKIADYPYSKFLVCNEHIDQVIGYVDTKDILVRILSEQPIFQLNESTIRNVLIIPDTLTLSELLDKFRASNEKMAVVINEYALVVGLITLSDIMMTVMGDWAAAEPEDLQIIRRDENSWLIDGITPIDDVKHALDINEFPDWDHYETLAGFIMYRLRKIPRPADWVEHEGFKFEVVDIDHYKIDQLLVTRLEQLPKHED

SEQ ID NO: 270 - protein, 145 aa, Moraxella catarrhalis
MASRSITAPTFEAVRICPKSCPKPSEMSIMLFAKPMSCLPSATCGAGYCMAWRNFSGKLSGGRLACPSPCKSSKIPCKARLASPTVPLTHTTSPTHAPWRVIACPCGTNPSAVTEIVKMGELVVSPPISSTPNGVQAVAKPPANA

SEQ ID NO: 271 - protein, 333 aa, Moraxella catarrhalis
MSTMSNTISTSDEFSHTTVLLPETVAMVLGVKQLNDVTSKVSGVYVDATFGRGGHSQLLLEYLAPEATLAVFDKDPEAIAVAKSLAAQDTRIKVVHDSFAHLTKNLQALGIDKIDGLMADLGVSSPQLDDGTRGFSFMRDGVVDMRMDTTRGEPVSEWLQRVSADELADVLYEYGEERHSRKIARAIKSMQNYTSTRQLAEVIKQAHPAWQKGKHPATQSFQAMRIFINNELGDVEAFLAQSIGVLKAGGMLAVISFHSLEDRLIKQFLQRHSRGQYEEDARLPIIPKRPKYFGKPKRIGPCDQEVKANPRARSAWLRGAVRSDVALVAQDED

SEQ ID NO: 272 - protein, 120 aa, Moraxella catarrhalis
MAIFMSNTPLMTTLNSSMTWVLRLVLAVLVVMIFATALGIVTQTQERHEAYIELQKRSRELNELKIEEQRLMIEQQTFSATPQVAQRAVSELGMFFPTNENRRVITPSAKPDSEPSQNSE

SEQ ID NO: 273 - protein, 652 aa, Moraxella catarrhalis
MTKQRKNPKTGSATTAASLHRPKASAKTFGILTKKRIKKSGANLAGGKQDAWRYLIIGGLMLCIFMAIFARAFYLQIVNPQFFIDKGDELITGKRIEPAYRGVITDREGAPLAANAPLYTVFFDPYAYAEEYYRLDNEIKTTKSETAKQKALKKLKEMDLVRLAAAANYPLEKLEAAVGIDHTLDTSNSQKVKEALPKGASSRRLVLLNRVSPEVAKSVTDLGLFAIGREQYFQRYYLQAEPNAQLLGYMAQSSDETQGGYIGRAGIEAKYNERLAGKDGKVQILRGTGRQPIQEIEQIEPLIEGENIRLTIDSRLQYVLYKELEQVGRLQSARSSSGMVVDVKTGEVLAMGSWPSFNSNNLSERDGANERNRPVLDVFEPGSVMKPFTVAAALESGKYTTNSVIDTSPGSMSVGGYTIRDSGNYGVITLDKLIQKSSNVASTKIALNLPTDAIANMQLKFGFGRKTALDFPAEASGRVSIPKERELARRATLSYGYGQQVTLAQLAQAYAALGNRGLMQPLKLVKDQKTPEPTQVIHAGHAEAIVRMMELVTGPGGTGQAAAINGYRVAGKTGTSRRTNPQGGYYTDQHRAIFVGLAPASDPRFVVSILVEDPRRQSYAGQVSAPVFHQVMKEALRLYNVPYDKPLRVLAP

SEQ ID NO: 274 - protein, 912 aa, Moraxella catarrhalis
MAKTVKQLAQTSKTTTETILKQLADAGLPSRGENDLVTDSEQDKLVAFLKQSHGEKPKSRISLKSKTTSTAQVTGTSGKAKTVNVVRTKKVVYDKPDPAKIEAKIAAQAKAAEEARLKAAEEKQAAERSKKEAAERQAATLAAMRASSEPVKNHEVNATVVVKKIKNPEDAKPADKAEKTDKKKPAKPIKKESATDKKAREAREAEEERLRQMEVETRRKAAEEAQKRTLEQMKQMASRYSDADDGATAAIVRTKDDAPLADGLVGAALEESFEKERREIKRGATGTAGKGGKKSRKGQQEEREMKTRAKGLKSSQANKHKFEMPVEKIVHNVEVGENIVLSDLAQKMAVKVREVIKSLMKMGEMVRESDSIDQMTAALVIEEFGHNFVPISDTQLEDDLQVAVDEKSGNVQTRPPVVTIMGHVDHGKTSLLDKIRTTKVASGEAGGITQHIGAYHVTTDRGLITFLDTPGHAAFTAMRSRGAQATDIVVLVVAADDGMMPQTEEAIDHARAAGTPLIVAINKMDKDTADPDRVINELSVKEVIPEEWGGDTPMVKVSAKSGMGIDELLEVISIQAELMELEAPIDGAAQGVVIESRLDKGRGAVASLLVKRGTLNQGDLVLAGEYYGKVRAMTDENGQRIKTAGPSIPVEILGLPEAPAAGSEFLVVSDEKKAREVADFRAARERERTLDRQNKMRLDTLFESMGSAEVATLNIILKTDVRGSLEALLNALDELSTDEVKVRVISSGVGAITESDVILAESSEAVLLGFNVRADNAGKRKADEAGIDIRYYSVIYGLIDDVKAAMSGMLAPEHREQILGIAEVRDVFRSSKFGAAAGCMVQEGTIYRNKPIRVLRDDKVIFTGHLQSLRRYKDDVNEVKAGMECGLAVKGYEVAVGDKIEVFEIHEVKREL

SEQ ID NO: 275 - protein, 157 aa, Moraxella catarrhalis
MNFNNILLIVYLFRGLMNQRLQRLADQIQRTLAILIRDEINDPRLTGFVTISSVKVSPDLGYADVYVTILEPSQDGGMNSEAHAQSLKVLNTAAGFLRTELARTMKTRTTPRLRFHYDEVTAHGNRMMSLVGQAMQKTQESEKNYLDEEHQLDDDKS

SEQ ID NO: 276 - protein, 235 aa, Moraxella catarrhalis
MVELIISISRYNNSCEYMMKKLILATVLAGLSTAAAANVLVNNGYYVQADLGYSNLEAKYNDNRPNDNKLEDKGLGYGISFGKDTDLARYALDYTNYGKINSSYTYQPQTNTNTSITSSGELKAQSLGLSAIYDFDTVSGFTPYAGARVGINQIKSTVSTVTTTTSAQSRTTHSQKQENKVGFGVLAGAQYAINPQLSVDAGVEYNYLGKYDKLDTDSKLKAHQYGVKVGLRHNF

SEQ ID NO: 277 - protein, 111 aa, Moraxella catarrhalis
MQIKLIASALIATLALTACSKPQEQAEAAADATVVANEASAAMTGDAAEAAAEAAADATAAANEASAAAMTGDAMTGDAAATEAAHAAADQAQANAEAAQAAATEATEQAK

SEQ ID NO: 278 - protein, 569 aa, Moraxella catarrhalis
MSIQGLLPRWILQLIQHPRTALSDIPAGLMMAVLVIPQSLGYATLAGLPPIMGLYAAITPVIVYAWIGASSVSSIGPVAITAIMTASALSGYATGSLQYISLAIVLAFMVGGILLIAGLIRLGWIMQFVSRGVASGFISGAAVLIIFSQLKHIIGIPLNTDSLINLFLSIYTSTQPIHLPTALLGIGATLLFIISRYGESIIWGWLPTQWRGFGNRFFVILIVAISIWLSHHIGFEQMQIRLLQPLPTGLPKITLPNFSATTLLDLLPSALLIALIAFISSSTISAQQARIRGESYDANKELGGLGLANITSGLFGGFAVSGGISRTSLNLSVGAKTPLASIICALGVLLVLLVFGQYLTGLPYAILAAVIISSVISMIDTKTLINAWQLDKSDAICFGITFFTSILFGLNSGLVVGLLASFAMMIYRTHQVHIAIVGRVGDSEHFRNIERHTATTFDGLLLLRIDESLYFGNAQSVHANLMRLSDDTNIHDIVLIMTAVNHIDLSAQEMLCAFNQSCIKRGQHLHLAEVKGPMMDILKTSPVIENLSGCIFLSANQAVQSLTKPSTDL

SEQ ID NO: 279 - protein, 275 aa, Moraxella catarrhalis
MQNFIKKNILAVTLAAATTTTIVGCASTTSTGVVGADRKQLLLISSQEIMQLSHQAYLQTINEARTKGRLDNNTAQVRRLHRIANRLIPQTAVLRPDATRWDWKVHAITDNQINAYVMPSGKIVFYTGIIERLRLTDAEIAAVMGHEMAHALREHSREKASRHIATQGVLSIAVNALGLSGGQAQLVGLAGRLGLDLPHSRTQEAEADKIGIELMARAGYDPNAAITLWQKMQSAGGNGVPQFLSTHPSSTNRIANLKALVPTVMPLYQTSQNIH

SEQ ID NO: 280 - protein, 380 aa, Moraxella catarrhalis
MMKTNIKLIGLSVAAVIALTACSKKDEQSAATQLEPAATTAAPADAAPVAMEQVAINITGAGASFPQPIYAKWSADFKEATSGQVNYQSIGSSGGIKQIIAKTVDFGASDAPLTVDELNAENLIQFPTVIGGVVPVVNIEGIEAGALKLDGETLANIYLGKVTKWNDPAIVALNPDLTLPDADITTVFRSDGSGTTFNFTDYLNKVSTDWAGSVGVDKAIKWPTASSGAAGKGNEGVASYVSRIKNSIGYVEYAYAKQNGMSHVALKNAAGKFVQPSADSFAAAGDIDWSAAPGFNQVLTNSETAGAWPIAAATFIIVHKNPENPEQVAGVLRFFDWAYTNGDQAALDLDYVPFSDKAVELFKASWNEVKDSSGNAVYAQ

SEQ ID NO: 281 - protein, 279 aa, Moraxella catarrhalis
MNTLNQSLNPTMNTAFTNSNTDDKTLSQTAAKVQVRNLDFYYGDYKALKNINLDILDKKVTAFIGPSGCGKSTLLRTLNRMYDLYSGMRATGEIILDNQNILDSRVDVNLLRARVGMVFQKPTPFAMSIYDNVAFGVKLYENLSKSELDDRVEWALQKSALWNEVKDKLKKSGLSLSGGQQQRLCIARSVATRPEVLLLDEPTSALDPISTGAIEELIHDLKQDYTIAIVTHNMQQAVRCSDFTAYMYLGDMIEMGETSQIFNNPQNQATADYIAGRHG

SEQ ID NO: 282 - protein, 496 aa, Moraxella catarrhalis
MPLSDTEKLAAIDIGSNSIHLAIAERHGDQLRRIASMSEKVQLAMGLDECNHLSSAVIDRGIECLTRFAGRLGDVNNSRLRVVATNTLRRAVNSQEFIVRANDILPVHIEIISGREEARLIYLGVSHTCPSHQQRFVVDIGGGSTELIIGKNLNPILTESTQMGVAGFTQQFFGDGNINALSFEKAIYVAQKEIIKYGSHYKKTGFEEAVGSSGTIKTIQQAIAGFGLGDEITLAGVEQLKSSLIACGHIDAIDMAGVKSHRKGIFPAGVAILLAIMRVFGIRLLRYCDGALREGVMYDMLSRMDFHDVRDDSVGMLIDRFGVDKKQAKRVAKTAGSLFNQVHKPLGLAIEGEYMLRRAALLHEVGLAIGHSSYHKHSSYLLRHADMAGFSRTDQEKLSLLVRYHRRTINGDDCDRIIKNGGKSLVYLALLLRLSVVANHGRFEISKHQLKLTIDNHHWHVTVKIDRPEHQACVIDIQDEAHWFAKWGICLTVSSV

SEQ ID NO: 283 - protein, 103 aa, Moraxella catarrhalis
MIFSRIISDAKKRSERSVICSASKMAGLIGKYSPMTDCNRSRLWRRSAETGMISAKSKLSLKLSMTGKSFDLSLTVSALLMTKITGKLVADNFSSVNKSSSRH

SEQ ID NO: 284 - protein, 453 aa, Moraxella catarrhalis
MKFNKIALAVIAAVAAPVAAPVAAQAGVTVSPLLLGYHYTDEAHNDQRKILRTGKKLELDATNAPAPANGGVALDSELWTGAAIGIELTPSTQFQVEYGISNRDAKSSDKSAHRFDAEQETISGNFLIGTEQFSGYNPTNKFKPYVLVGAGQSKIKVNAIDGYTAEVANGQNIAKDQAVKAGQEVAESKDTIGNLGLGARYLVNDALALRGEARAIHNFDNKWWEGLALAGLEVTLGGRLAPAVPVAPVAEPVAEPVVAPAPVILPKPEPEPVIEEAPAVIEDIVVDSDGDGVPDHLDACPGTPVNTVVDPRGCPVQVNLVEELRQELRVFFDYDKSIIKPQYREEVAKVAAQMREFPNATATIEGHASRDSARSSARYNQRLSEARANAVKSMLSNEFGIAPNRLNAVGYGFDRPIAPNTTAEGKAMNRRVEAVITGSKTTTVDQTKDMIVQ

SEQ ID NO: 285 - protein, 265 aa, Moraxella catarrhalis
MKFKTFGLMAAIVGTFSISACSGQNEQSTKASGDTLRIATEGTYAPFNYTNPDGSLGGFDVDIANALCNKMQTECQIIAQDWDGIIPALKTGKFDAIVAAMSVTPERSEQVDFSEPYFVNSLVFLAKKGSNFDPSSTDAINNAKIVAQRSTISSQWLTQTYPNSKPQLYDTLDNAFIDLGNERADAMISDKLPALTWLSSDLGQNFEIKGGDININDKVSIAVDKGNTALLQKFNEALAAIKADGTYKQIVIKHFGEAGMPTNIE

SEQ ID NO: 286 - protein, 262 aa, Moraxella catarrhalis
MIKPFATLATVACVTLAGCTKEETSTQTTAPAQPSQKSIVIATEAAYPPFNDTDASGQIIGFDVDVMNALCAEMHAHCQIIAQDWDGLIPSLLAGKYDAIIAGMSITPERQAQVDFSDSYFSNTIVWLAKSDGSFDPNNITNQTLASQRGTTGAAYITEKYDGKDGNRVQLHDTYTNAYLDTKAGRNHAVMAEKVSAIDWLKQEGNGEFGLIGEEIDNNDHLGIAVRKGDSLKAEFDAALAKIKESGKLAEIEKAHFQSDTF

SEQ ID NO: 287 - protein, 277 aa, Moraxella catarrhalis
MKLYRFFLTFVLICTFLGFFMTDSRPIALDLQDIHKSYGSLEVLKGVSLTAYDGDVISILGSSGSGKSTLLRCINLLEKPTSGKIIVGQETLKLKSHKGELVAADNKQLEKLRSKIGFVFQNFNLWPHKTILQNIIEGPTQVLGISKADAIKDAERLLTKVGLLDKKDAYPDNLSGGQRQRVAIARSLAMQPQVLLFDEPTSALDPELVNEVLAVMRELADEGRTMLIVTHEMRFAREVSSKVVFLHQGRIEEIGTPKEVFDHPKSARVREFMASHR

SEQ ID NO: 288 - protein, 875 aa, Moraxella catarrhalis
MATSKKTTTKAEAALTKANARGKSLVIVESPAKAKTINKYLGKDYVVRSSVGHVRDLPVGGSATKTNKTQDVGLSREEKAQKALVRRMGVDPEHDWAAVYEILPNKTKVIRELKALAKEADKIYLATDLDREGEAIAWHLKEVIGGSDDKYSRVVFNEITKTAIQTAFEHPDQLNIDRVNAQQARRFLDRVVGFMVSPLLWAKIARGLSAGRVQSVATRLVVEREREIRAFVPVEYWKIHTNNTAAGETLNLEAVKKNGKTLKLGNKAQADEVVLALGSSDFIVSAIEEKPTQSRPSAPFITSTLQQAASTRLGFSVKKTMILAQRLYEAGHITYMRTDSTFLSQDALNLVREYITDHFGDDYLPQKPNFYGNKQNAQEAHEAIRPSHVLVKSSQLTGMERDAQRLYELIWRQFVACQMMPARYQSVNLMVAAGDIELKAKGRTLVFDGYTKVQPPAKTDDILLPAVKVGEKLPLIEILPTQHFTSPPARYSEASLVKELESLGIGRPSTYASIISTIQERGYVKLENKRLYAEKMGDIVTERLVESFPDLMDYAFTAGLEDKLDEVAVGEEDWKTVLDRFYHDFKQKLDYAKTTDGMRPNNPTNVPDIHCDLCHRPMQIRTGSTGVFLGCTGYNLPPKERCKGTKNLMPVSAFEFDADDDSAEVNALMEKKRCPKCNTAMDGYIVDGGLKLHICGNNPDCDGHVLEKGVFEIGGATSDTPTIDCDKCDGQMELKTGRFGAYFACRKCDNTRKVLKNGQAAPPRMTPIDMPKLRSQKFDDHYVLREGAAGLFLAASKFPKVRETRPPKLSELREIKDQLEPKFYYLFDAPDTDDVGNPTILRWSRKNQEQYVGSEKDGKATRFALVWRDGAWVQA

SEQ ID NO: 289 - protein, 959 aa, Moraxella catarrhalis
MTAMTNTAYPNINSIPSLAKLSTDQVDTTRPPVILVDGSYYLFRCFHGLPPLSNSQGLPTNAIRGVLNALNKLIKKYHPTHMAVAFDTKAPTFRHNLSEAYKAHRPPMDEALRIQIPYIHEMIEKLGIALIKIDGFEADDIIGTLAYQACQQGHRVIISTGDKDMAQLVNDCVMLEDSFTGKLTDNAGVIEKFGVTSEQIADYLALMGDASDGISGIPKVGQKTAAKLLNEYQNIDGILANLANIKGAVGKSIADNQDSIPLNRILATIVTNLKLAISFDDITLDHSQETTIERAPALYALFEELEFKKEMAQTAELLNLPHQPTDKAVSIDIHDNTLSSQTPILPIKDISYHTITTQQDFTKLLDKLNHTPYFAIDTETTDINWQHAKLVGISVSTADYEGYYIPVGHTADFDVLLDNQLPIDTVLSAFKPILENPNIGKIGQHLKYDAHIFKKYGINISPWQMDTMLASYVINAAATRHGMDALAKHYLGVQTTTFEDVAGKGAKQLSFDKVAMDAASQYACEDADITFRLFNRFNQHINQDKTAAQLLYHLEMPTAQILTQMEHDGILIDTDFLGQLSDEFDKKIMALQIEAERIADEPFNLASPKQLGEILFDKLGIAGGKKTKTGQYATSEAVLSKIEHPLIDVVLEHRSLSKLKSTYTDTLANAADEQGRVHTSYHQALTSTGRLSSSDPNLQNIPIRTDTGRLIREAFIAPKGRMILAADYSQIELRLMAHFSGDESLIRAFNHNLDIHTATAAEIMGKDISEVTPSERRAAKAVNFGLLYGMSAFGLAKQIEVDRAVAQDYIKRYFARYPAILEYMERTKTMAKQLGYVQTILGRKLYSPDIQSSNRMIKDAAERAAINAPLQGSAAEIIKLAMIAVDEVLPKDDAKLLLQVHDELVFEVDTDKAHDIGNLIKTAMQNALTDTAKKLGWAVDFAVPLVVEIGIGENWEQAH

SEQ ID NO: 290 - protein, 538 aa, Moraxella catarrhalis
MYTSSTKRQAMTTHLTNEINQRRTFAIISHPDAGKTTMTEKLLLWGKAIQVAGEVRGRKADRHATSDWMSMEQERGISITTSVMQFPYKNHVVNLLDTPGHADFSEDTYRTLTAVDSALMVIDGAKGVEERTIKLMEVCRMRDTPIISFVNKLDREIQNPLALLDEIESVLKIKCVPFAYPIGMGQDFVGVYSFVDNKTYFYKKGFGSQIVEIESKDGYDHADIKDRLGQILWDEFIENIELAQMAYEDWDEREFLAGRQTPVLFGTALGNFGVNMILDVLTQYAPPPKDHVAVERTVKADEPAFTGFVFKIQANMDPKHRDRVAFMRVCSGKYERGMKMNHVRLGKEVRVSDALMFLAGDRETLDEAYAGDIIGLHNHGTIQIGDSFTSGETLNFTGIPHFAPELFRRVVLKDPMKSKQLQKGLQQLSEEGATQVFMPQINNDLILGAVGVLQFEVVAHRLLEEYKVQCTFEPISIATVRWVYSDDKVAFEKFKKKAHDQLSVDGGGYLTYLAPSRVNLQLMQERYPEVEFRATREH

SEQ ID NO: 291 - protein, 509 aa, Moraxella catarrhalis
MSKSIQSNLSSKHSQSTTPQHYLRIWRWHFYAGLFVIPFLVILAGTGLGMIILSNTVGKQGELISVSPQNTSMAVSHQAHIATSNIAGGQVTQYIAPKDDHHAAAFLVKNHDTQVANWVAIDPYTAQIVGTQPQKSGLYHTLDSIHGDLLMGKTGDLLLETAASLTILLIITGIYLWWQKRKSVIKMLTVQDTKTKRNLWREIHAVLGSWTAIVLLFFCITGLAWAGIWGEKIMQAWNQFPAGKWGVEPVPTSSLPVDTAHDDASYQQQNTADTPHHATDISAPTHGDALNDGTKQVPWVLEKTPMPSSTPTSNAWQMTQPDIDFIDNMAKNMGFVGRYQINYPKTPTGVWSISQDSMSYDSPNPTADRTVHIDRYSGEVLADIRYHDYSAFGKFMAVGIALHMGTAGIFSILANLLFCLSVIAICISGLVMWWQRRPATNLHKNNKSALPMGLIPPASQKNIPIWWGFGGVLLLISALFPMGLFAILVIVILDWLIISRVPLLSKLLK

SEQ ID NO: 292 - protein, 989 aa, Moraxella catarrhalis
MTTLHSSFELIDKRSIEALDITVLTSRHRLTGAIHYHLACDNSENALMIGFATQPMTSRGEAHILEHVVLCGSQKYPVRDPFFSMIKRSLNTFMNAMTASDWTVYPFASQNKKDFFNLLSVYLDAVFFPNIHPLDFAQEGVRVEINQDNQPEYHGIVFNEMKGAMSGEIDQLYYALMPHLFPTTTYHYNSGGDPAQIPKMTHEDLVAFHQTHYHPSNAIIMSFGNIAVDEIQAKIHDEALSHFDDIQKPAQGKKFTSVIEKPLSQPIQVYDTYSADSDDKQMTHHVLAWLLPTITDPRLRLSLRLMEGVLAEHSGSPLRAYLESHPLAVAPSPLLGLDDSHYQMVFYAGVRGSEPEHAEVLEKGILALLNQIADNPISQEVIETILHQIEIDQRHIGGDSMPYGLTLMLEAFSTAVHGGNPLDVWQIDEHLAWLKQQAGEPNWLQNLIRQYLIDNPHRVRLTLSADTKKAARLVDEENQALATLDTTLSDDDKQNLLTQAAQLKARQAAPDDVSLLPKVGLEDIPSEVAFTKGIKTTLSLDGETYPVHLYHTGTNGLYYYQVITPLTDKVADEVINNPLLPLYLTLLSEVGTNNYDARTFQAVQASHSSGVTARISQRTQLTDKESLSSYFVVATRALNRKLEAIELVSEVMNETVFSETDRIRELLQQKQSSWQARLASAGHAYAMQTASSRMSRQARIEYAYSGLPALVALKSFLASAQADDSLWDTLCHRLSELHQTLISLPKQVLLVCEEQVSPDLLDEISKYISTKKTPAPSQKVSHKLVFDTLDELLCQQDEPKTAWLISSNVYYNAAAYQATTSEHEDTPALMVLAPFLRNGYLHGAIREKGGAYGSGASFDSNAAAFRFYSYRDPHCAKTFAHFDKSIDWLLQTKHDTEQLHEAILGIIAGMDKPGSPAGEAVKSCFNELHHRDKAWQQNLRAKILAVSIDDLKYVAQKYLKNKPSHQAVLAPIEQELALIDMGFKIKKLS

SEQ ID NO: 293 - protein, 406 aa, Moraxella catarrhalis
MSISVDTLIIGAGASGLFCAFNTAAYGKSVLIIDHANKAGKKILMSGGGRCNFVNKQVEPCHFISQNPHFVKSALSKYQPEDFIDLVNRHHIAHQEREHGQLFCKNSAKDILSMLLNECHMAGVDIHLKTTVQDIQATDTHFLVTVKSQPDNRIKVIQAHTLVIATGGLSIPTLGASGFGYQVAIQFGHQIIPTRAGLVPFTFTDKVGEMIKSLAGLSLDVTAYNDKASFDLPILFTHRGLSGPAILQLSNHWQAGEQITINLVPTQDVYQYLLDAKRIHPKQLLRTALAALLPKKLISGFEQLFWQAYQNIELANLKDETMHHIGQQLNAWHLKPSGTEGYRVAEVTLGGVDTHDISGKTMESRRQPNLYFIGEVLDVAGQLGGYNFTWAWASAYACAQSIGVRW

SEQ ID NO: 294 - protein, 84 aa, Moraxella catarrhalis
MPLTCLTLVGRLALPNANALSCVYAHWPAKWQSAIPKLGQNWAFLWQMMPISQKRWKNGCQKNQKLSYDTVNIVNTVNPSCIPE

SEQ ID NO: 295 - protein, 1177 aa, Moraxella catarrhalis
MLLSLGILPIRNIMKRILINATHSEEIRVALCKDNHLYDFDLENRTREQKKANIYKGHITRVEPSLEAAFVEYGSARQGFLPLREIAPEYLNGNTHEDSIKQLIKEGDEIIVQVEKEERGNKGAALSSFISLAGRYLVLMPNNPKAGGISRQISGKVREEMKQIIAGLNLPKNMSVIVRTAGLGKGADDLQNDLDHLLDIWKSIQEQNKKRPSPCLVHQEAGVVTRAVRDYLRDDIGEVWIDSENAYDEAANFIKAVMPTQLSKLRKYTDYEPMFARFGIERQIETAYQREVRLPSGGSIVIDQTEALVAIDINSSKSTKGSDVAETAYHTNLEAADEIARQLRLRDMGGLIVIDFIDMNDPRHQKDVEKRLIEATRHDRARVQFSEISKFGLMQMSRQRLRPSLEESTGYICPRCHGNGMIRDLRSLSLSIMRQIEQIALKERMGEIQAEVPTDIAAFLLNEKRESLVYLEQDSGARITILPHAHLESPNFSLHFNPDGFAPSSYERIADTEEKENIDRGYEVNWQTDHEKSDSNRWQKSDNKPIKKNTTDSEPKPTKPEPQAVAWLSNLFAPKPQAKVAGSLGTADAALAIEALVNGGAVSLGAAGRMANIQAPSAEPTPRPQAEDKRHKKSRNAKKESGEETAAQAQPSEKTDKKTKKERDKEQYPKREAGSRRESRGEIVRGETLHKTEEKAEKADKADKPIRADKPKSEKTEKLPHQKAANPKEVVLHVSSIKAAENNTQVIHLSLDGSKSTKPTKDETSSAKDDAKIAPKANSNQAIKAPKEPIPTKPKHEAEPITQSDESGEMSALHTVSATTGVEPKLAEKIQTLAKSMNKATNDPRVVQIALQQTQAINLNAITAGALILRVLGKSATGNFVNDFITAMTKMSTPAQFDFANFGYSPLDTATKNEFGKLTQATAQASAPQGRTEAIPRPITRRAANDPRGQHPEYIEATSPNNDQVSKTIAQHSNQASPDTFDHAVTPADTKHKESKTATDSSSDSDNSQLSKADDAVEHQTNDAIDATTLAAEQISDSIGDTVSKTMADISTVVSEAADDTAKMADLDTHNQVKPESGKDKKVSQIKEITADQKTERKTKANSYKDMIENVAGQLQPQVGILNLMATKPAKVSKPAKTRAPRKPSKKPTKVEVRKLSKPVEPSESSPAKSADDSANN

SEQ ID NO: 296 - protein, 318 aa, Moraxella catarrhalis
MINSRKMLPLFKKLHTKQPKLAQKLSLLTNASAITANSLALGVPVIGAGLAKTLTRSKLADQTIITAANRWIHTNNLLIDKVLPHKDWRIFLPKNLNPNGKYLLICNHQSWVDTSIIQYISEGRLPITRFFAKHELIYIPVVGQAFYFLDFPMMKRHTKAQIAKNPQLARRDLDEALRACQSLKNKPFVLLNYLEGTRFTAEKHTKQSSPYKHLLRPKAGGFALALSSLGDEIDGILDMTLVYPDGAPKYSDLWSGKLTRLSVDIEFISPNDELLTALKHGEYDTNQTIKHALYAWLDEIWQAKDKKISQRLAEFHQS

SEQ ID NO: 297 - protein, 130 aa, Moraxella catarrhalis
MAKDTRSRKKVARRSVSEGIAHIHASFNNTIVTITDRQGNALAWATSGGQGFRGSRKSTPFAAQVAAEVAGKTAQETYGVKNVDVLVKGPGPGRESAVRALGALGYKINSISDVTPIPHNGCRPPKKRRV

SEQ ID NO: 298 - protein, 469 aa, Moraxella catarrhalis
MSKKYAVVGLGSSGLSAVNFLVNHGHKVSIIDGNPNPTLADKLPTGVHCHFGSLDSELLSSADQIIISPGIDPRTPSIAAAKAQGIPVVSDVQLFIDTLKARDLAQATNTPVIAITGSNAKSTVTTLVGEMAKRAGMIVGVGGNIGTPALELLTIQNMDLVVLELSSFQLEHISNLAAQGATILNLSADHLDRHDGMADYLAQKLRIFEHCQTAIICQDDAGLAKQCLTTLQRIAPNHTIITTNSLLSHQTADFYLFDDGDGMALYHQKDKLLPIHQLKIKGKHNLLNALSALALGTAANLPMDAMLDTLKTFKGLPHRCEYIDDIDGKAYFNDSKGTNIGSTMAAIDGLGTVYGTSSLALILGGLGKGQDFSELSAYVTQWADSVYLIGQDAPMIEQDLLKGDAHLVSKIYQVGTLDQAVLAASQSTAKAVLLSPACASMDQFKNYNERGDKFVNMVHALAHPCKRPA

SEQ ID NO: 299 - protein, 349 aa, Moraxella catarrhalis
MIHFKHPKQISAWLLVIMMSATSTAHANDSAINSAEQLTTHITTAIKQTIVKSTDNDRLYQDHDQQADGEIVGVRSFDDSFSNCQNQFANRQAPTLIGKQGERLSTMARALCFEGFATLHSGIARTPLWSASHLTQARISQARTLARVDSFHAESRLPADERAELSDYRRSGYDRGHIAPNGDMATTESQYDSFSLANIAPQNGEHNRHLWRHIETQTRQLAIEYGEVYVVTGVAFLGKTSERIGGRVLVPSHFFKAVYIPKLSAAGVYFSSNDSSENYQIISLDELARLTGINAMPSLPTQIRQTAYDLPRPSSNKNPEQKVLDHQPSSWFDLVISAMRYVFETLNRT

SEQ ID NO: 300 - protein, 504 aa, Moraxella catarrhalis
MSFAKVFTRSVVGLQAPQVFVEVHLSQGLPALTIVGLPEASVRESKDRVRSALINSGYEFPNRRLTINLAPADLPKDGARLDLPIAMGILAASGQIDDKVLAQFEFVGELALNGELRPVSGALAIARAIKSSPCDGKPRTLIMPSINADEAVKVGDMTVLAAENLETVCRHLDVVSGISQNQEHLLSPVTLPSQPQVMQYAYDLADVKGQHHARRALEIAAAGGHSLLFTGSPGSGKTLMASRLPSILPPLTDAETLEVASIYSIAGVNYAFGERPFRAVHHTISATALVGGGSKPKPGEISLAHKGAIFLDEIPEFDRKTLETLRQPIESKQITISRANAQVSFPADFQLIAAMNPCPCGYYGDTTNRCRCRPEQIKKYQDKLSGPLLDRIDLHITVPALPIEDLQNAPKGESSDDVRQRVVAARNMAIARQGKANYELTVNELDQFAILGQKEQQMLKMAQSKLNLSARSYHRILRVARTIADLAASEHIKTAHVAEALSYR

SEQ ID NO: 301 - protein, 347 aa, Moraxella catarrhalis
MQDIWHYPRAELAQQVMGLFNSNLSHALTFFAPRRKGKTEFLLKDIKPLAIEQDYQVFYFSFLDSGEQAQKRFIYELTAFGQGKIGKAINQLSSVEIQGFKAELQHLQHDDVLHALNAIAKQNKRTLLLLDEIQALAGVAYYPIIASLRTALDTNKDKIKVIFTGSSRENLRLMFSSAQAPFFHYGQNVDFPDLPKAFTDHLADTFYHTTKRQLDKDALWQAFIELNKSPQMARAMIEKMALNPNLSLDDAKQLLIDDTAQFNEYLPTYRQLTALQQAVLVLIAMGENQPYSQATKDRLGKKLGIEITTPAIQSAIRSLSKKGLIFKKDNGVYEIDDPFFNQWVLDN

SEQ ID NO: 302 - protein, 692 aa, Moraxella catarrhalis
MYNLNDLTNIAKGLFGKLINQGFDAITIHQYTDTQGSTIYAKARLKNAQGKKHIRPFFFDMDNQWKMGEPVFTPNQKPLYYLHKLSQAQSVWIFEGEQKADLMDNLGYTATTTGGSNTIITHDLQPLAGKKCILWRDNDNAGISWLGTFIQALQVLSPPPTIHIVDVDKLGLVEKGDIVDYMQECDFATMQAKLQALPMLDNDHLSQLSHATSTAKTAQNNQPATATPASKQDEPWGEPSPLDDKYHKENDYPLDSFGSELAGVITQIAYYAQVPLAVAGQSVLGVLSAIGQRMANAPFLNTHIPASLFLITEFPSGQGKSQATKLANYELAEWEKENYLNYLAVLNDWERQPPKEKANNPKPKSHTYMVSDGTIEAVTDKFILDEQKDVYWNTDEAGQFFNGYSMKSDTAGSSISSLTKLWDGSPVSKIRSQRGKTGQDRTNAYDARLTLDVMGQRVILEPAMTDPVLINQGFLPRALLACPKSFQGYRKYNTPERMTASPSQDWQLVKYYQKCRDLLIGKPAKRENMPFKDQNAKQALADYMQDVENKQRTGEPYAQIPAFAGRMGENTARIACLLALFQGEKTVSKDHIIKASKLVDFSIAERLKYCDIVDDNKGDAELLIDWLIKRAKMHKKSSFGYSEVQSTISPKVLRQKAVFDLAIDYLLEKQHIRIAYQDDCRFIEINPKLLTA

SEQ ID NO: 303 - protein, 136 aa, Moraxella catarrhalis
MVNHYEIKKLKKWLEIYHCDSKKQSQLFNFPLSKLINGVIMKIRPLHDRIVVRRTEEEQKTAGGILLPGSAAEKPQQGEVIAAGNGLVRENGEVRPLDVAVGDVVLFGQYSGQTVKVDGEELLILKESDVLGVLEA

SEQ ID NO: 304 - protein, 398 aa, Moraxella catarrhalis
MSNNSHCSDIIIVGAGPAGLAFSRFFKGSDVRLTLIEKSSLAALQNPAYDGREIALTNTSKEILQNLGAWQRFAPDEIYPLKDAKVYNGNLNYALHFQVPKLMHRQRSLDRLGNLISNHNIKKALYDEVATMDNVTLITDATVTDVNTDDTKACVTLMNGKQLYADLVIAADSRLSGMRRMLGIGAHMHDFGRTVIVFRVTHPLSNHGTAQECFLYGRTLALLPLNETMTNCVITLDNTQADELLKMTPEQLAHEAQRMFGDGFGTFTIAGTVHHYPLMGVHAHKFHANRAALIGDAAVGMHPVTAHGYNLGLQSANTLAPLILQAHRRGLDIGSNHLLSMYNRRHQAHTRPLYHGTNAMVTVFTTDTLPMRTVRDMALRLSNNFPPVKHWIAKQLVG

SEQ ID NO: 305 - protein, 639 aa, Moraxella catarrhalis
MVAITLPDGSIKQFDGNTTVMQVAQSIGAGLAKATVAGRVNGRLVDASDPITTDATVEIITPKDDAGVEIIRHSTAHLLGHAVKQLYPDVKMVIGPVIDDGFYYDIYSERPFTLDDMAKIEARMTELINQDYDVIKKMTPRDEVIKTFLERGETYKLRLVEDMPDETHMGLYHHQEYIDMCRGPHVPNTRFLKAFKLTKMSGAYWRGDAKNEQLQRIYGTAWADKKQLKAYLQRLEEAEKRDHRKIGKALNLFHMQEQAPGMVFWHPNGWTIWQVLEQYMRKVQKDNGYLEIKTPQIVDRSLWEKSGHWDNYGEMMFTTASEKRDYAIKPMNCPCHVQVFNQGLKSYRDLPLRLAEFGSCHRNEPSGSLHGIMRVRGFTQDDAHIFCTNAQIRQEALNFIKLTLDVYKDFGFDHIQMKLSTRPEKRVGADELWDLAEQALADALDNAGLDWELQAGEGAFYGPKIEFSLQDCIGRVWQCGTLQLDFNLPERLDAEFVGESGERERPVMLHRAILGSFERFIGILIEHYAGLFPAWLAPQQVVVMNITDKQADSVGDVVSKLNAKGYRAISDLRNEKIGFKIRERTLERIPFMLILGDKEVESGTVNVRTRTGENLGSMNLDDFIAVLDKAIEKKGRLNL

SEQ ID NO: 306 - protein, 70 aa, Moraxella catarrhalis
MLYNQKAFFTHAAWLDQAFAHCPIFPTAASRRSLGRVSVPVWLIILSDQLQIVALVGLYPTNQLIRLRLI

SEQ ID NO: 307 - protein, 669 aa, Moraxella catarrhalis
MKTANKLTITALLATISIMQAACAQGHANDGSIYQFFDVERQKSSPNALRQYEKNMQGTLFGMYPTYWRLNYNLSGQSPEAVNQFVHQYPSTVMSEKLAADYAEIKARQGDYASVRAVADSIENPDESEACAIALGFNQSRDSLRALYQKPNVWLNTQIRQSLCDKLATEMVYNPRITNIDKHEQLLRMLRIDKRQLSSRQAPLDKTGDIISLLGQLNISVSYQTINEIRNNPNEFLTRFSQESYSNTNQYLYVYAISLLAHRSYSEAAIQLNYDIAQDELRTQKLISDMARQYAWRSIAVKRMNMNTDDGYSMDAVHWFRNSLGETFNYEEAEDYAQAAIYFGQWSDVITAISAMTAVEQQERIWQYWLARAYEQLGQQAKAQHIYHNLAKGIDYYGLLAKDRIGQRLSLSDIGGNVLPSISTSDEQRMMADQHFARAILLMQNNASLEHINREWNWAVKKARDLGNTTLLLSAAKKAHDLGFYHRSIHAIETTDYLRNAALSHPTPYQDSTLKHSRNAGIDPAWAYGIMRQESRFQPSAQSGAGAGGLMQIIPSTATQIARSLGESTGNMSNPDTNIRYGTWFLNDLANRARGQIAVATASYNAGPNAARRWVPTHGAISADQYVEAIAYAETRAYVKHVMENATIYSLLLGQYTPISQRMGTVSPY

SEQ ID NO: 308 - protein, 293 aa, Moraxella catarrhalis
MSQTQPTEPVIWLKREVPGVKRTTVPTLTAVETEPSTECPNCHALITNTALILNQYVCPECDHHLTMTARQRLEWFLSSVETELGQEFITGNPLNFIDSKPYPERMKEAQNKTGESEGLVVMAGKLKHLDIIACAFDFRFMGGSMGSVVGDRFVQAAEKALTENKPLVCFAASGGARMQEGLLSLMQMARTSAAIERLRLAGVPYVVILTNPVYGGVTASLAMLGDVHIAEPKAMIGFAGKRVIEQTVREVLGEPFQRAEFLLEKGTVDMVVHRHELINTTHRILAKLTKSAV

SEQ ID NO: 309 - protein, 365 aa, Moraxella catarrhalis
MISKQIVLGITLVIGSGVAFFALAKNDTQTTKSVQTPQQIPSDTKVAKPVVQPLTADIATEEKLLAEKQRVREAHTLQMQKQAAALLEEQNNARKQALEKASAEANGRMTNDTQTVSADSAAKSELIAAPTVQTRPEAIEAARKAEEAKKAAEMLKNSEQETKDEKAKTADKPTENKAENKKENKNTQTKAPVKAGTHDVQRGETWQGIANRYGISVAALVEANGVTRNDILRAERRIKIPSASQIARLERDNKARESASKDGNKKSDNQPQSKTDKKTESKSQSSQTSERYMVQVAISPDKDRVDEVVKKYRDAGYKVTTSNTSRGLRILVGNEKTEEEAKALRTKIAADSRVPSSGAFVHKAQ

SEQ ID NO: 310 - protein, 152 aa, Moraxella catarrhalis
MFHKITLAAACFMTVILAGCNSSGTATANNPQVEDRAKLMKDWRHANEGMKAMIEDPSRFDAITFKERADFIADTNATMWVHFEGEMAQGGHAKDEIWTDPEGFQTKIEAFTSSINALALAASEAASAADVEASYGEMASQCGSCHKAYKKK

SEQ ID NO: 311 - protein, 709 aa, Moraxella catarrhalis
MNFLIIGSKTVMTDSATYRQSYTAKVFDEILTMRPDTPILDCIASPDDLKALTNDQLIELADELRAYLLYSTGVSGGHFGANLGVVELTIALHAVLNTPYDKLVWDVGHQAYAHKVLTGRRERLPSIRSKDGLTAFPEREESQYDTFGVGHSSTSISAALGMSLAARLLGENRTVAAVIGDGAMTGGMAFEAMNDAVQQNADLLVVLNDNDMSISAAIGGFSRHLAKLWQRGLAMDIDKHGNILMVKRTISSDDRRIRHYLHMANGAFEDVSSRLPSKISEKISELFHGVTSSPLPDKIAEKIGDKLFADNLFKAIGFTYLGPYDGHDLPKLIQVLERAKQLKGAILIHVHTIKGKGFLPAEADPIGYHAIGKLPKAGKNQAPASAPTAKKYSQIFGDWLLHWANIDERLVAITPAMAEGSGMVEYATKYPKRFFDVAIAEQHAVTLAAGMATSGKIKPVVAIYSTFLQRGYDQLIHDVALQNLDVTFAIDRAGLVGEDGATHAGVFDLAFLRCVPNVIIAAPSDEHECHQLLNTCYQYDGVAAVRYPRGVGVGRKVDMTDEHYPIGRANVVWQSSNFDTKSTKKLAVLSFGTRLKDALTAAQRLSESQAIACIVVDMRWVKPLDEALILRLLEMGVTHIATVEEHQITGGAGSAVNEFIVSLQALVKLLNIGIKDAFIHHASHEEQLLYCRLDTDGIYQSLSNLIIKN

SEQ ID NO: 312 - protein, 480 aa, Moraxella catarrhalis
MSALRQTQSQLQLYDTLSASKRPFKPIHAGQIGIYVCGMTVYDYCHMGHARVMVGFDVIVRWLRAIGYQVNYVRNITDIDDKIIQRAYDNGETITELTDRFITAMHQDEQFLGCQSPNIEPRATEHIENMQHLIDVLLTKNLAYQGSGGDVYYAIEKFPNYGKLSKRHVDDMQAGASERVSTAEDKRHPFDFVLWKTAKPSEPHWQSPWGLGRPGWHIECSAMSTCCLGETFDIHGGGHDLQFPHHENEIAQSEGATGKTYANHWMHMGFINIDGEKMSKSLGNFFTIREVVDKFHPETIRFFLLSSHYRSPVNFSDTALKESHTALSRIYQSLKSAENFGVISIMPNAWESEAGQAFAKAMNDDFNTPKAVSVLFSVVTEINRAMKAGEYQKATQEASTLKTLASVLNIAQSSPHEFLQANIGNKPDGLSDAEIANKIAQRQQAKAQKNFAKADAIRDELNRQGIELEDGRMGTTWRRI

SEQ ID NO: 313 - protein, 114 aa, Moraxella catarrhalis
MPKIPIIKADFIYENALMKMLIWSLMVLGLVVASNAYADIEKIYAQSCATCHDSGTFNAPKKGDVAIWHRLNQQKGQEALIKSIRQGMPQMPAMGLCQNCTDEDFAKLIDYMSR

SEQ ID NO: 314 - protein, 242 aa, Moraxella catarrhalis
MRKIMRSNNRQNNELRPIHFIRQYTKHAEGSVLVCFGDTKVLCTASIEAGVPRWLKGQGKGWLTAEYGMLPRATGTRTQREAARGKQSGRTQEIQRLIGRSLRAMLDLSKLGENTIYIDCDVIQADGGTRTASISGAAVALIDALEHLQRRKKLTQDPLLGLVAAVSVGVNQGRVLLDLDYAEDSTCDTDLNVVMTQAGGFIEIQGTAEEKPFTRAEANAMLDLAELGIGQIIEAQKQVLGW

SEQ ID NO: 315 - protein, 253 aa, Moraxella catarrhalis
MMKAIKLSVVSAAVLLSTSAMANVVTNTGATVVDGTRTIFSTLVKPAAVSAEVGTLGYGANIGWAVNDTVELQAGWAGGNIAKSINDNFNANGVNYQLETDFSNPYLGAQVRPAANWFTVGTGIIVPKNDIKVRSNNTTDGVFRVDGKDYKQSDVGQLTGKLEHRNKLAPYLTLGFRPNLHSNWGVFGEVGAAYLGKVDATVDAQNPTKSVTATDSKTQETVIKIAKQAERDIEDKKYANWFPIAKVGVTYRF

SEQ ID NO: 316 - protein, 867 aa, Moraxella catarrhalis
MIMTDTVQKDTAQSPKKVYLKDYTPPVYAVDKVDLDIRLFDDHAVVGAKLKMTRAHAGDLRLFGRDLKLKSIHLNGQELESQAYHLDKEGLTILDAPNVAVIETLVEISPQTNTTLEGLYQAGTGDDKMFVTQCEPEGFRKITFFPDRPDVLTEYTTRLEAPKHFKTLLANGNLVESGDVDENRHYTIWHDPTKKPSYLFAAVIANLEVLQDHYTTIEGREVLLEVYADAQDIDKCHVGMQALKDAMKWDEDNYGRAYDLDRYMIVATGQFNMGAMENKGLNIFNTSCVLSSPETTTDERSFLVKSVIAHEYFHNWTGNRITCRDWFQLCLKEGFTVFRDQSFSGDFRSKAVQRIEDVAVLRAAQFAEDAGSLAHPVRPESFVEINNFYTMTIYEKGAEIVRMIANFLGKEKFRQGSDEYFARYDGQAVTVEDFLSAMSVADARVMDFLAWYRQPGTPVVSGGYRVLGDKVIINLSQKTRHVPNYDAPVALPIPVDTAIFDSLTGEMLASRMLLLTTDNAQFEFDHIQLSDGAHPVVSVLRNFSAPVKIDFDYTDEDLASLVAFESEGFNRWQALQILMNRWLSGSVEDATLIISVIQKAVDELIEDDPMLAARLFDIPSQKELAMAYDENYDPISVKARRDELIGKIADGLLENTKLWYQKLPLQAYEDTPQARGRRLLRNVLLNLRLTAGDEMAHQDAYHQYDNASCMSERLGALMAMIEHNLDKKDSYLDDFYAKFSHEDLVIDAWFVAQATPDSTSVSQIASLMERTDYDWNTPNRVRTTLSALAAKPVQLWTAEGLDLYLSSVVRLDGSNPQLAARLLSALARWNTLTADKKAMAQEKLAAVTSQVSSKNVLEFLQNMQTVA

SEQ ID NO: 317 - protein, 407 aa, Moraxella catarrhalis
MKQFFALSVLAMSMSTSANYLTNYQDPNTDQLIQALNNNRIHIVQLGDSHTAGDSMTEALRSQLQSRYGNGGMGWAMPMYFSGQRMARYGYDNYQWTPISSRRNQNEDYTLGGLIAKPNFSGSTLTIKAKNQEPMQSMTVSIRQSATDGLFKISDADGNHLILEAPIKNDTWQTTTFDAKLPFTLTAEGSMTNTAIGGWWGRSKHELGAIVSSLGINGAELSHWSRWNQNAWQQELATIAPELIILAYGTNEAYNNLSAERIATVLDERIEQIRQASPHSAIMIVSSPEVLKNTAGSCGVRPPTLHAIQEVQRQTAQNKHTLFWDWQSAMGGSCSMKQWMKSGKATKDGVHFTHLGYQQLGRQMADDIISLSALNSSSHLTPPPQMISPSPISIAPSLSTTRTFYQK

SEQ ID NO: 318 - protein, 365 aa, Moraxella catarrhalis
MQTSNQPISKVAQTKQYPEPKHIRLKLRPKPYFHGKSYSYLLIVLCLFATLGVWIMQNSINAYYLQTYHKSSPLSLLDRYPAWKMGGDIGNKLYAWHGDLTSAINQKNQQIVDYFNDNLAYTPKYQAMMAKSLESTPAAQMDNVGVSEAKPDNPYVIHSGDEIFFAGDSMMQGVAPHIQQYLQKNYNIKSVNLAKQSTGLAYPSLFNWPKTIKETLSINANIKILVVFLGPNDPWDMPDLVNGGQLKFQTPEWEMGYRQRMMDILDSAKNHNTQVIWITPPNMKKQKLNKQMIYLNQIMQDELKRHHVLIIDSRKLLGTSDDIYNDYLIQDGKSVKMRTADGIHFSVKGQKLIAQAVQDQITIIP

SEQ ID NO: 319 - protein, 337 aa, Moraxella catarrhalis
MTGVAMNNFLKTTLWASLVALTLAACGGDKPTAQADLAASQAKTVAITAIVEHPALDAARQGALDQLTKEGFKEGENLTVNFQSAQGNMATAGQIARQFTSDNPDLIYAIATPSAQAIAAATQDIPVVFSAVTDPIEARLVANLENSGNNITGASDALPYEPQIALIQELVPTVKNVGYVFSPGEVNSTVVLKTLKEKLAPLGINVIEAPAQKSSDITQAANSLVGRVDVIYTSTDNNVINAYEALYQVAKTAKIPLISADTSTVERGAVAALGVNYTDLGKEAGKIIARILKGEKPADIPVHISENLDLYISKKHAAEQGIILPQAVIDRATKVVE

SEQ ID NO: 320 - protein, 241 aa, Moraxella catarrhalis
MKVLNSLIKFGAGAVLATVGAFASTNALASGGHGCGEYTEADGTVVTLECSKAPIDLTNKGSLQRGAAMFMNYCAGCHSAQYVRHSRLAQDLNIPPELVEKYLLVTGDAIGDHINAGIDPELQSQWFGAAPPDLSLETRLRGDDWVYTYLLSFYEDPSRPWGANNLVLANAAMPHVLHNLQEELGKEEYEARVGDLVNFMAWMAEPVRHDRKIYGAFVILFLLILLIPVYLLNKEFWKDVK

SEQ ID NO: 321 - protein, 632 aa, Moraxella catarrhalis
MNAISYTHPKTFDVIVIGGGHAGTEACLAAARMGANTLLITHNIETLGQMSCNPAIGGIGKSHLVREVDALGGAMALATDKAGIQFRVLNSRKGAAVRATRAQADRILYKAAIRHTLENQPNLTIFQQSVDDIIVENTRAVAVVTATGIRLNTRAVVLTSGTFLGGVIHVGLDHQSGGRAGDMPAIRLADRLRELKLPVGRLKTGTPARIDARTVDFSVMTVQSGDTPLPVMSYMGDVAMHPRQINCYITHTNERTHEIIRANLDRSPMFSGKIEGVGPRYCPSIEDKIHRFADKDSHQIFIEPEGLTTHELYPNGISTSLPFDVQLEFIHSMKGLENAHITRPGYAIEYDYFDPQNLKPTLETKSIDALYFAGQINGTTGYEEAAAQGLLAGLNAARMALDEPSWVPQRHEAYLGVLVDDLITHGTKEPYRMFTSRAEHRLILREDNADARLTAIGRELGLVDDERWARFSQKMESIASETARLKDIWATPNNAIGQDFMANTGEILTKENSLLDLLKRPNITFDDIAKVSDSTVSAKVGEQIEISVKYQGYIERQNDEIEQMKRLENTLLPLDFDYKSVSGLSNEIVQKLSQIRPTTLGQASRISGVTPAAVSLLAMTIKKLKKTQAVMT

SEQ ID NO: 322 - protein, 322 aa, Moraxella catarrhalis
MNLQKVDLNLLFYLDVLLREKNVTRAAEQLGITQPAMSNILRRLRSLFNDPLLVRSSEGMTPTERAFELQPRIREVLLDITTLLEPRTEFRPYSTSRVFRIMTSDYAEATLVPRLVKALRSEAPNVILDFLTPSDVSYRDMEQGRVDLAINRFNEIPQSFHQVLVWRDTFSCLLSADSSYANRFNLKNYLKAHHIWVSKTGMGVGFGVNPEKSGGLGSIDQALQRLGQKRQISVFTRHYQMPAMLVANKDLIATLPTRVARLQADNHPNIIIKEPPFFIPEFELTMAWSPLLQHHPAHRWLRQLILHVARQVIAEENQVIKA

SEQ ID NO: 323 - protein, 483 aa, Moraxella catarrhalis
MSEEQKPKKKPRPAPEKIIPTSKDMDATKHRVHPRFAKGKYTNIRLISMYLILLGFLIAPWLRWDGRQALLFDVIEPKFYIFGATFMPQDFYFFAFVFIIAALMLFMVTVYAGRVWCGYACPQTIYVHLYQHVEKWILGERNKRIKFDKMPWNAEKIIKTALIHTIWGVFSAITAVTFIAFIVGTDYLFFNGHPLFFMGWGKMTWIFFILIVFVTQTNAGYMREHMCVYICPYGRFQSVMFDKDTLIVSYDYERGEPRGARKKDTTPAGYGDCVDCTMCVQVCPTGIDIRNGLQVECIQCAACIDACNEIMDKVGYPRGLIRYTTERQLVEKQKTKIIGWRIFAYTGVLLACIIAATMVLVSRAPLEMEIRHDRKQLSTIRRDGMVENSYVLKIVNKTNERQVYQVRLDAENAAGMTLRSRFKELPLQASELYDLPVSIIGDPNIIKPGSTPVTITVYSKDGQYSASAQDVFIYEPKKSKQPK

SEQ ID NO: 324 - protein, 355 aa, Moraxella catarrhalis
MSFFWSSWITILSLGCWLFIFGVLVWTLRSRPVLEEDETTGHSYDGIREYDKPLPKWWLVIFFGTMIWGLGYFILFPSIQPNTWKGVTTVEVDGESVPWTSANELNSQLQANNRVFTENFEQNILENAGASEATVVLAKLNDLQSQRKAGEENAELQTQIDEQVKLLAPYVDKLASDPEAQKIGNRLFLQNCALCHGSNARGALGYPDLTDNDWLYGGNADQILLTIHNGRVGSMAAWQQQLGESGVRAAAEYVLQLSGNQNDYELDAAKVAQGKVLFEANCVVCHGPDAKGSAAIGAPNLTDDIWLFGGDRDAVQTSIRHGRAGVMPEWQTKLGNERIMLLAAYVRSLSQTAAE

SEQ ID NO: 325 - protein, 679 aa, Moraxella catarrhalis
MKKTKLFATVGAAVLSASILAACSNNSTTASQGGGDLTTYKYVFSGDPKSLDYILANQAVTADVTTQMVDGLLENDEYGNLVPSLATDWSVSEDGLTYTYTLRDGVFWYTSDGEEYAPVTAHDFVTGLKHAVDGKSDALYVVEDSVKNLKAYKEGKVNWEEVGVKALDDKTVQYTLNQPESYWNSKVTYSVLFPVNAKFLQSKGKDFGALDPSSILVNGAYFLSAYASKSLMEFTKNDNYWDADNVHVQSVKLTYTDGSDPGSYYRNFDKGEFSVARLYPNDPTYQAAREKYQDNIVYGLIDGTTYYFTFNLNRSAFANSTKTTEQQESAKKAMLNKDFRQAVMFALDRAAYQAQTVGEEAKTKALRNMLVPPTFVSADGEDFGQMVKKDLVGYGAEWQDVDLSDSQDGLYNPQKAKEEFAKARQTLEAQGVTFPIYLDFPIDQADSNRVQQAQSFKQSVEASLGQENIIINVIETETSTYESQGYYAESPEQQDYDIMMAGWGPDYQDPRTYLDIMSPIDGAMLQKTGIHRGGDKALVKQVGLDTYQTLLNQASVISNDNSARYNAYAKAQALLLDSALQIPMVAIGGVPRVSKGVPFSGSFSWAGNKGGSWYKRLKLQAQPVTTEQYEKAYQAWQSEKSASNAKYADSLVNRVKKSDTAASDAAATDAATTDTTTAN

SEQ ID NO: 326 - protein, 161 aa, Moraxella catarrhalis
MEAEPNLYTKPFKFELLNNNIWRYSMKILALAPATALALVGFIGAAHAQVDHAQEAHDSTVLKRQVTYACQSGGQATVTYGFNQQRLPTYASAYVDGKNRFMPFNLNRSDNVDSVFGDENNYSLMTDAMTLYNYHKLGINITSPSGDFAHKGCNVRYVTKL

SEQ ID NO: 327 - protein, 878 aa, Moraxella catarrhalis
MSQISLEDYNFSAIEKQLQTQWESDKRYHTNNETTDKPTRYMLSMFPYPSGKLHMGHVRNYAITDVLSRYYRQKGYEVMQPMGWDAFGLPAENAAIANAVAPAKWTFDNIANMREQLKALGLSIDWSREFATCTPEYYRWEQWLFLQLYKKGLVYKKLATVNWDPVDNTVLANEQVVDGRGWRSGAIVEKRDIPMYYFKITDYADELLDDLKTLEGHWPKQVLSMQQNWIGRSQGMELDFTYSIDDHDAVLRVFTTRPDTIMGVSYLAVAAEHPLAQHAAKQNPAIAEFCAECKQGSVAEADIAKAEKVGINTGLTAKHPITGTDVPVWVANYVLMSYGSGAVMAVPAHDERDFEFANKYNLPIPQVIDFKDKPSNYSTNQWQDWYSDKTGFCINSGILDGLSYHDAVTKVNEIITEKGLGQTTTQYRLRDWGVSRQRYWGCPIPMVNCEYCGTVPVDEADLPVVLPTDVIPDGRGNPLKNMPEFLQTTCPKCGQPAERETDTFDTFVESSWYAQRFVSPHDDSQMIERTAADKWLPVDQYVGGVEHAVLHLLYARFFHKVMRDEGLVSKDEPFANLLAQGMVLAGTYYRSNSDGSTTYYFPHEIDFVMNGTEIEGATLKADGKPVTIGKIEKMSKSKNNGVDPQEIIEQYGADTVRLYTLFTAPADQTLEWSDSALKGPHNFIKKVWRTVGEHLSAIQNHQSNDLTINKDTLSKDAKNLRRKTHETIAKIDVSLGEHLALNTPVSSLMELCNEIASFKPTDNNDIAARHEAIVALLTLLSLYAPHVGEYLLEALKIDARTQAFPVLDKSALINDTITMVVQVNGKVRGKMEVASGTDQAELIREAKNIEGVSKYLIGDIKKEIVVPNKLISFVVAGA

SEQ ID NO: 328 - protein, 578 aa, Moraxella catarrhalis
MSLKHNQTHNTTFTKFLKSNSFWSKGFWSNRHHRTKDLKGLDAYLFMAIVAIFLTTTANVTFFQQVMSVYPLANYALFIASLAVVLTGVLLLLLVLLGYRHTLKTVAICFILIATFAGHFTDTYGTVYDTTMLQNALQTDTAETKDLLSMKLLIRVVLLAGLPICWIIGQPLSFGTLKASLMKRLVTYLVALALVGLPILAFSSQYASFFREHKPLRFFTNPVTVMYSAGKLANMSYKNATKPTETIMHANDAIQKTTASTRKPRLVVMVVGETARADHASFNGYQRATFPHMDKLIGLGQVHNFGNVTSCGTSTAYSVPCMFSYLGAEKYDVDTADYHENVIDTLDRLGVAILWRDNNSDSKGVMNRLPAKQYQDYKNSPLQGGNNTICHTNPYDECRDVGMLVDLDDHVKAHANQDILIVLHQMGNHGPAYYKRYDDEFAQFLPVCTSSELAECERQTVINAYDNALLATDDFLKQTIDWLVAQTHADTAMLYLSDHGESLGEKGVYLHGMPKAFAPKEQLSIPALLWLGADSPFAVANSPTAGFSHDAITPTLLNLFDVSTQATADKTAFVNPLD

SEQ ID NO: 329 - protein, 590 aa, Moraxella catarrhalis
MSQFWINIIFVSLSFALYFGIAIWARAGSTKEFYVAGGGVHPVVNGMATAADWMSAASFISMAGMLAMGGYAASAYLMGWTGGFVLLALLLAPYLRKFGKFTVPDFIGDRFYSKTARLVAVVCLILACTTYVIGQMTGAGVAFSRFLEVDSNTGLIIAAIVVLFYAVLGGMKGITYTQVAQYCVLMVAYIIPAIFISLNLTGNPIPQLGMFGNDVSTGMPILQKLDMLVADLGFAQYTADVPNKLNMFLLTMSLMIGTAGLPHVIIRFFTVPKVSDARISAGWTLIFIALLYTTAPAVGSMARLNIINTVYPQGLNQPALAYEARPEWMKNWETTGLLKYEDKNNDGLIQYYNDKNEEYATTVTAEKGWQGNELTANNDILVLANPEIANLPSWVIGLIAAGGLAAALSTAAGLLLAISSAISHDLIKKTIKPDINDKGELMAARISMTIAIVVATYLGMNPPGFTAQVVAVAFGIAASSLFPALMMGIFSKRINSTGATAGMIAGLSATCIYVFLYMGWFFIPGTNSFENVEANWILGVSPLSFGAIGAVINFIVAIAVSAMGNPPPKEVQDLVESVRYPKGAGGAINH

SEQ ID NO: 330 - protein, 950 aa, Moraxella catarrhalis
MSFNDFSELFYENAFVHRHLGKDANEQQALLQTVGFDDLDSFVDAVVPKAVRLNKDLDLPEAMSEHNALAKLRAMADNITVAKSYIGQGYSPTRLPAVIQRNVLENPGWYTAYTPYQAEIAQGRLEALLNFQQVCIDLTGMDLAGASLLDEATAAAEAMAMARRVSKSKSNAFFVDERTYPQTLDVIHTRAKYFGFDVVVGDFDVAKNGEFFGAFFQYVGKDGDVVDLTDVITAVKDNGAYAIVASDIMSLVLLKSPADMGADIALGSTQRFGIPMGFGGPHAAYFAFKDKDKRSAPGRIIGVSKDAQGNTALRMALQTREQHIRREKANSNICTSQVLLANLAGMYAVYHGAVGLKRIATRIHALAVAFAKAVKSSELAVRHDVFFDTVLVECGGQAQAIFKTAKDKGYNLWQHDNGGISVSFHELTDEAEFDELCQIFGVKGSLDAIQIQLDDLLRQDDILTHPVFNSHHTEHQMLRYLKSLEDKDLAMNRSMISLGSCTMKLNATSEMLPITWDEFANVHPFAPSGDTKGYIQMIESLQAQLKAITGFDEISMQPNSGASGEYAGLLAIRRYHESMGQDERNVCLIPRSAHGTNPATAQMMGMKVVVVATDDNGNVDIDDLKAKCDEHGDKLGALMITYPSTHGVFEEGIRDICDMIHAHGGQVYMDGANMNAQVGIMQPADVGADVLHMNLHKTFCIPHGGGGPGMGPIGLKSHLAPFISNHRINPVFNAQSDCSAVSAAPYGSANILPISWMYITMMGRDGLLSATKQALLNANYIATKLSEDYPVLYTGKNGRVAHECIIDIRPLKAQTGISETDIAKRLMDYGFHAPTMSFPVAGTLMIEPTESESKAEIDRLISALKQIKQEALKVQTGEDGWTPDDNPLVNAPHTAFVITGEWTHPYSREEAAFPLPYIKAHKFWPSVGRVDDVYGDKNLICACPSIENYE

SEQ ID NO: 331 - protein, 91 aa, Moraxella catarrhalis
MLLVSFLVYNQSNCFLPCLTNGNLSTRTSISLPRMITLACSPVKLAGTRAMAMDWFRVGENTPLVVMPDPSSVITSMLARSTPPLASSNPT

SEQ ID NO: 332 - protein, 306 aa, Moraxella catarrhalis
MIMMKVPNPKLLTTSLLVLTSAIAVFSFSACYQIGDVVNEAAAEATQQPPIRTPKQTAKLNAFENSTYQTATDELLKAYNWTLISAEVQGAPIHSYENIIKNRAGSLSFSNRGLYFNVGCNHHSQHYQLSEGVLSIHHRTSTLMACHHSDSNSPDLAQVESKFAQDLNGSNLQIKTGPDEYTATLLLQKGAQVLTWQGDMKPEVRFGESVLLFWEIEPNKINCIDEIGQEQRCLKVRNVTYNEQGIKTGSGAWRTFYGQIHEYEHQPNLRQIIRLNAYNNPDSKENPYYIYDRPVEIYYLDVPVSQ

SEQ ID NO: 333 - protein, 377 aa, Moraxella catarrhalis
MAEKMVVGLVGWRGMVGSVLMSRMVEEGDFQHITPVFFSTSNAGGQAPSFDGVDGGTLKDATDILELSRCDAIITCQGGDYTKQVHSALRDSGWHGYWIDAASSLRMQEDAIIILDPINRDVIDKALADGKKDFIGGNCTVSLMLMAIGELFRRGWVEWVSAMTYQAASGAGANNMRELIKGMGVLRDSVSDQLDDPASAILEIDRTIADTQRSDDFPKQHFGAVLAGSLIPYIDSQLDNGQSREEWKAQAETNKILGKSADETINIDGICVRIGAMRCHSQALTIKLTKDIPLAEITTALRESNNPWLDVVENDKAASMERLTPVAVTGTLNVAVGRLRKLNMGGEYLTAFTVGDQLLWGAAEPLRRMLAILQGRI

SEQ ID NO: 334 - protein, 171 aa, Moraxella catarrhalis
MNLCALMMVLVIGVSTTAAASFELYEFDSPQQEAQYRVLIEELRCPKCQNQNLAGSDAPIAQDLKQKTYEMVKDGRSDAEIRNYMFERYGDFISYKPPVRPSTWILWFFPPILLLLLLLGWIYKAQKGRSWSKQIPTSHAPLSAGEEAKLKKILAHHQNKSLDGSDSKPTK

SEQ ID NO: 335 - protein, 813 aa, Moraxella catarrhalis
MTIAQQHSNACVLWLTNTQITPKLLNKFVLLTTVVITFGISKMMTFMSSPSNNALVSLLSSVQSLDCTDFFYYDKSWLIVADLNPDEPPYASPEKSMQTLSIKPSKLRLGKLLLPASLMMILSACHTLIPPKQTPAKLLEKTRSSIITNGRVSAATQSILVSAGYTQESCMADFEACVDDVRSIFFIEMPNRLQLSVFSELYYTYADNLIAKDACRIELARPPIDPYYTNAPISKDIAENQQKARTECHAKYRDALYQTVKYSYAYLFYYSLGGHGTPSSLPQESDIRTLDLYHLAINDLITQIYRKDHGAFYNAKFQDVVSSEQLEPIYNQLRIGRVLSNDHGQNTLHISVGDRDFLTSKLKQHEHSSELFSEMISAYDSRLLDLDVNARRSGLGVSFVGAINDRHTTSIDNLKKLARNKALDDRIHHVGHIQLTAIMKPTGNTIDEVLSSHEFYAYFFNPSNNTHVKIGDTSYPLTANFSAGYALWLAENQLRQVSLTNMISRSDAIALPELFMLKPYNPDQKVIIMLHGLASSPATWVNLTNTLLTDSKLNENYQVWQVAYATNLPILENRYQIHELIRHTFAKLDPNGQDKASHNAVLIGHSMGGVISRLLVSDTDLTQKLHTLGHKEQYKLINHLSADQRQTLSNRLVLSSLPQVDEAIFLSAPHRGTDYADRWFTRAARRIIKLPIELTRSLSTIFTNDVQSQSFLGTLYLQNGASQLSDHSSFMALTKDIQISPSVRYHSIIGNHTNTNQQGDAVGKTISDGIVPYTSSHLEGAASEIIVEGKHNTHENPKTIVQLRKILHEHLDQ

SEQ ID NO: 336 - protein, 919 aa, Moraxella catarrhalis
MSKPVLFANCSFMPVALAAYLPLMTSQALAQQNNSANIINHIPAHDTAINQAKAGNPPVLLTPEQIQARLNAAGLNAKPQSQALDVVNFDDQSPISRIGEQSPPLGLDMSVIEETTPLSLEELFAQESTEMGINPNDYIPEYQGEQPNSEVVVPPTLEPEKPGLIKRLYARLFNDGVNKVPRLKAKFYQSSQSGETSAIGSSHQKTEPYANIKAALEDITQESAMDLNGSIPRLRQTALVAARAVGYYDIDLSIIRNSIGEVDVIIHDLGEPVYIDYRAVEVRGEGADDKAFTTVADEVPLLIGDVFHHGKYETKKNLIENASAEHGYFDGRWLDRSVDVILPDNTADVSLIYDTGTQYRFDEVVFFTIDPKTNQLTTDPDKLPVKRELLEQLLTVNMGEAYNLQAVRALSNDLIATRYFNMVNTEIVFPEREQIQNDQVSFEQSSSSRTEPAQVDESTLEPVIETVELTDGILMDISPIEFSASNLIQDKLNLVAAKARHLYDMPDDRVLAINHDDGVNRSILGRISDAVSAVARAILPDESENEVIDLPERTALANRKTPADVYQSKKVPLYVFVASDKPRDGQIGLGWGSDTGTRLVTKFEHNLINRDGYQAGAELRLSEDKKGVKLYATKPLSHPLNDQLRATLGYQQEVFGHSTNGFDLSTRTLEHEISRSIIQNGGWNRTYSLRYRLDKLKTQAPPETWQDLPVDFVNGKPSQEALLAGVAVHKTVADNLVNPMRGYRQRYSLEVGSSGLVSDANMAIARAGISGVYSFGDNAYGSNRAHQMTGGIQVGYIWSDNFNHVPYRLRFFAGGDQSIRGYAHDSLSPISDKGYLTGGQVLAVGTAEYNYEFMKDLRLAVFGDIGNAYDKGFTNDTKIGAGVGVRWASPVGQVRVDVATGVKEEGNPIKLHFFIGTPF

SEQ ID NO: 337 - protein, 570 aa, Moraxella catarrhalis
MPHITPKNPAFDFNKYQPFAFAPKLENRTWPDKTITKAPIWASVDLRDGNQALIDPMSIEQKLKFFKLLVEIGFKEIEIGFPSAAQVEFDFTRRLIEEGLVPDDVTLQVLVQAREHLIDRTFEALKGARRAIVHVYNSTSKVQRDKVYQMDKAQIKQIAIDGATMLRDKAKHYPETQWVFEYSPESFSQTETDYAVEVCDAVCEIWRPDTGQEVILNLPATVEASTPNIYADQVEYFCRHLKARPHVTISLHTHNDRGCAVAASELGLMAGADRIEGTLLGNGERTGNMDILVMAMNLYTQGIDPELDLSQVSDIVQIVSECNNLPVHPRHPYVGELVFTAFSGSHQDAIKKSLDYNEKHPETQQHWDVAYLPIDPIHIGRGYQDVVRINSQSGKGGAAYILQRHFGFNLPRWTQIDFARVVQAYAESMARELKTDELLEIFTQAYLKQDKFRLSDYTISNKGDAVSFQGQVATPKAVFEVIGQGNGALSAFIDGLVKSTGRQIHVTNYAEHAIDNKTHQKTDTDNQTDAAAAAYIQLSVEGQIYSGIATCHSTVSAMLKGALSALAQAW

SEQ ID NO: 338 - protein, 955 aa, Moraxella catarrhalis
MNKIYKVKKNAAGHSVACSEFAKGHTKKAVLGSLLIVGILGMATTASAQQPNNQELATGAHIGGGDENQAKGKYSTIGGGYSNVTEAKGAYSTIVGGNNNQADGTHSTIGGGFTNQTEGAYSTIVGGFANQTKGAYSTIVGGNNNRADGTYSAIGGGDDNEAKGNNSTVAGGYKNEAIGDNSTVAGGSNNQAKGAGSFAAGVGNQANTDNAVALGNKNTINGDNSVAIGSNNTVEKGQTNVFILGSGTSRAKSNSVLLGNGTTGKEATTVEHATVNGLTLTGFAGASKTGNGTVSVGSENNERQIVNVGAGEISAKSTDAVNGSQLHALATAVAKNKADITKNTENIKNLEVATLGNHADVQELKRKQESDIKDVVEMQNAIAEQADKNKNHIQDLAKAQLAGVAVMEELNKHVEDLYEATNDNLDKISQLDGAVFNNTQNIAKNSNHIKTLESNVEEGLLDLSGRLIDQKADIDNNINNIYELAQQQDQHSSDIKILKNNVEEGLLDLSGRLIDQKADLTKDIKTLENNVEEGLLDLSGRLIDQKADLTKDIKTLESNVEEGLLDLSGRLIDQKADIAKNQADIAQNQTDIQDLAAYNELQDQYAQKQTEAIDALNKASSANTDRIATAELGIAENKKDAQIAKAQANENKDGIAKNQADIQLHDKKITNLGILHSMVARAVGNNTQGVATNKADIAKNQADIANNIKNIYELAQQQDQHSSDIKTLAKVSAANTDRIAKNKAEADASFETLTKNQNTLIEQGEALVEQNKAINQELEGFAAHADVQDKQILQNQADITTNKTAIEQNINRTVANGFEIEKNKAGIATNKQELILQNDRLNRINETNNHQDQKIDQLGYALKEQGQHFNNRISAVERQTAGGIANAIAIATLPSPSRAGEHHVLFGSGYHNGQAAVSLGAAGLSDTGKSTYKIGLSWSDAGGLSGGVGGSYRWK

SEQ ID NO: 339 - protein, 66 aa, Moraxella catarrhalis
MRLPPFTNAKISPNTPMSTPKASGCPPAATTMGMSGRRGPCVPGKLDVGRINDEKISTKNAAIIIS

SEQ ID NO: 340 - protein, 125 aa, Moraxella catarrhalis
MILLLVTSSPHSHAGKLAVEYATKQLHLGNQISVFFYGDGAYTANRLMWQTADVPSVAKQWQALSNNHGITLPVCVSTALARGVCDAQNATRHGLIGDNLLPPFSLVGLSELAMMIDDTTSVVQF

SEQ ID NO: 341 - protein, 937 aa, Moraxella catarrhalis
MVSLHFMPNQAQLDCLSLASPFASQIYQKHSDDAQAFLGEYGFERSLSSLDFDALVRRFVGLGKTNYLDFTNEEMVMSGLRKLRQMLMLKWIWQDALSVISLEELTHELSDFADSCIQFSKDFVYHKLTKRYGEPMIRQKNKTLKDELAIIAMGKLGAQELNLSSDIDLIFVHINNGETNGKKVIDNYKFMRDLGRGIIKLLDENTEHGFVFRVDMRLRPWGDGSPLVMHMAALDKYFSQHGRTWERFAWLKARVVNDISDEFGQTLNQLSRNFVHRYYIDYSAFSALREMKAMIINQQIQRQDLDNVKLGVGGIRDIEFIVQAFALIYGGHHIRIAENPACLDCLTVLTELDYIDNDESKQLAAAYRFLRRLEHAIQARYDQQTQCLPSDSDEMLAIAQTLGYESVKAFRSVLDAHRHNVSRPFGRMVTDRQSPKQESLDIAQIRSSLDDVLGDNSAVVLDEFMSSRLVMGLDDVAKDRLNQAYPIILHALLAHAQKDGAESAKIALPRLIALLEAICRRSIYLVMLSENPDATVRLIPTLSASLWIARELAHYPVLLDTFLQKRYLHLPDKAELTDILRQSLLRVEPFDDEGYLTTIRLFKKTQVLAVATADVLGLRHTMKVSDSLTYIAEVVLESALYRVFHELSVKHGFPLLNTHERASIADCGFAIIGYGKLGGLEMGYASDLDLVFLHRIDEKSETDGEKPISGMKFASRLIQKLMNYLATQTRDGRAYEIDTRLRPSGNAGVPVISAHAFKMYQTDKAWAWEHQALVRARGLTGDVLVLQAFDRIRKQVLTTPRQETQVRQNVIEMRQKMQHHLGTKTMRRAYGETEQFNLKQDFGGLIDIEFLAQFMVLAYANKYPNLAIWPDNVRIFEEVEKTGIWTANRCQKLTQAYLDLRKKTHELALSEQKNIVDDQAWHELRQFVREVWEDVLG

SEQ ID NO: 342 - protein, 603 aa, Moraxella catarrhalis
MTNHPSDFANLPHSSYLSLLCQADSSLTPSNFISMQDLLAYQNLNSLIKFVKYNLQLMILWHKIINCNTGYITMNDPQNTIIKQGLRLKLRRKALGLSAEALASKMSELGVPVSRGAIANWECGKNGIVMSKLPILAAALGVSESYLISGDHLTLQTTKQKTVNEIWPKSTLIKSSVNQTPIILSSEYAIMPQTKPLKKSNKLANVCYDIRGELLQTANRMEAEGQRIIKLNIGNPAPFGLLAPEEIVRDVALNLPEASGYSDSQGIFSARKAILQYYQGKGLLSAIDVNDVYIGNGVSELIVMTMQALLDDDDEILIPMPDYPLWTAAANLAGGKAVHYRCLEDDHWQPDLKDIESKITSRTKGIVIINPNNPTGAVYTDEILKSIVALAKKYDLVIMADEIYDRILYDGVTHTPMCTITNDCLVLTYNGLSKSHRIAGYRAGWLMVSGKKHHATDFIEGLTMLASMRLCANVPAQYAIQTAMGGYQSMQDLTAPTGRLYKQRNLAVERLNAIKGISCTMPQGAFYCFAKIDRDIYPIDNDMKFMMDLLIEEKVLIIQGTGFNWDQPDHFRVVFLPNLIDLEDAMDRLDRFFAKKRREFGTN

SEQ ID NO: 343 - protein, 1078 aa, Moraxella catarrhalis
MPKRTDIKSILIIGAGPIVIGQACEFDYSGAQACKALKEEGYRVILVNSNPATIMTDPSMADATYIEPITWQTVEQIIAKERPDAILPTMGGQTALNCALDLDKHGVLAKYGCELIGATKEAIEKAEDRELFDKAMKKIGLECPKAEIAQSMDDAFAIQAKVGFPCIIRPSFTMGGSGGGIAYNREEFIEICERGFDLSPTHQLLIDESLIGWKEYEMEVVRDKKDNCIIVCSIENFDPMGVHTGDSITVAPAQTLTDKEYQIMRNASIAVLREIGVETGGSNVQFGINPKTGRMVVIEMNPRVSRSSALASKATGFPIAKIAAKLAVGYTLDELKNDITGGKTPASFEPAIDYVVTKMPRFNFEKFPQAESVLTTQMKSVGEVMAIGRNFQESMQKALRGLEIGVAGFDEQLDFEQNDDSIISTLKLKLKTPTPERIFYIADALRFGLSVDDVFADTNIDPWFLVQIEDIVHTENQLKTLGMGDLTPNLLRRLKRKGLSDARIAKLMGVSEKQFRKTRWNMGIYPVYKRVDTCAAEFETSTAYMYSTYDEECEANPSNKDKIMVIGGGPNRIGQGIEFDYCCVHAALAMREDGYETIMVNCNPETVSTDYDTSDRLYFEPITLEDVLEIVRTEQPKGVIVQYGGQTPLKLARSLEQAGVPIIGTSPDAIDRAEDRERFLQMINKLNLRQPNNSIVKSSEEGIREAAKVGYPLVVRPSYVLGGRAMEIVYNEDELKRYLRDAVQASHEAPVLLDHFLDDAIEVDVDCVSDGKEVVIGGIMQHIEQAGVHSGDSACSIPPYSLSDDIQDDMRRQTVAMAKELGVVGLMNVQFAIKGETVYVLEVNPRASRTVPFVSKCIGVSLAKVAARCMAGQTLAEQNFTQEIVPSHYSVKEAVFPFAKFPGVDPILGPEMKSTGEVMGVGQTFGEAYYKATLGSGDRLTGLPQEGETKTVFISVRDSDKAGVVDVAKRLAGFGFNIVATGGTHDMLVGAGVACKRVNKVSEGRPHIVDMMKNGQIHLAINTTEGKQALKDSFPIRREALQNKILVANTLNAGRAVCEAYETTLPFNVYKLQDLHAK

SEQ ID NO: 344 - protein, 322 aa, Moraxella catarrhalis
MTVTIAINSQNQKPIKRLGLIFGVITTCILAGCASKPTYNSTSGSGSHRTSGSGGLAIGSQVITDSQGVPNRYQVKQGDTVSKIAQRYGLNWREIGHINNLNSSYTIYTGQWLTLWSGDLKVRERSISSGVNTAHTPSPVAVQSSRPPVQQHPAVQKPTPPVVVVKKPTPIPPVVQQPAPVAPPVTEAPFATGSSGVMQFRYPVGATNPVVRRFGTATVAGSTVTSNGMWFSGRDGDLINASNAGTVIQADHNMDGASIVIQHTNGFVSSYIHIKDAQVKTGDTVRTGQRIASMKNQPSGAALFEFRISRNGVYVDPLTVLK

SEQ ID NO: 345 - protein, 434 aa, Moraxella catarrhalis
MQGKFIIKTLTAAVISCTSLVSQASISGNSHDGIVAVVNDEIILKSELNQATELVATEIQKNGGNVTQDQAQTLALDELINEKLQLAIINRAGVIPNDEVIDQQLLQIAQSQGVNSLSEFQSKLDAERAGSYVALRANLIQDAAIQALWQNQIQSRVRITDDQIDAFLSSPESARLNQVQYRLLHIRVPYLDNTASEQNRQQAALVAERVKSSLDAGMNLDQAMQNARGDYTPDLQGADTGLINATALPPAIAAKVDKLTIGQTSTPIVTVNGIDIVKVVNKQQQNQVIVPKWQTSHILARIDSNQSSDIAEQKINAIYQQLQQGADFGTLAATYSDDTGSASQHGSLGWVNEGDMVPEFETMMKNTAKGDFSTPFRSQFGWHILKVNDIKQHDITEQYRRNAAHEYLFLRSAPQAQEDWLQELRSSAYIKIYE

SEQ ID NO: 346 - protein, 937 aa, Moraxella catarrhalis
MIRSRILCASLMHTAHHHRSKTYLTTAIRYALFGIASLPFVIPTYAELNTSRSLTVVGADSSKNLPDTPNTKPNTVLALDAHLQSHDDTANAFDGFDFEVITQQAAEQTSSQANQGNHQMSQLDAFASKSDNPSLNTARLTDKHDTPSASKSLAKLAENYHIKSDPDAHRCQGMWMQPIHQATHTNRPTTPKLDENGNPITEDGIFAQADYGYYDAQTYAELSGNVIMEQNGRRVTADKLTLDTQTGQATASGQVQFSDGGASDHSAGIIGMAENLVYHTDGQTATAQDVAFASTTINAHGYASQMDKISSSEYRLQHVMFTTCPPTERKWYLDTDSIDINTDTGRAIAKNTTLRIKKVPVFYLPYFNFPIDARRSSGFLLPSMGFGASDSFEISTPYYLNLAPNYDATITPTVFTNRNPMLTGEFRYLTQDYGSGVLTASYLPKDQQYHDKDRSRIQFDHTWQPKQFDKITTYAQYQSVSDANYLSDFNALGVESAKLNLPRRIGTSFLDENVSADLRFEDFQRLDGFGLDGRPITDKDRPYARLPQLSVNYRLPRIWMGTPSGLELGGIHNSAYFKKSIKDNSEPEKSGGRIFNQFTASYPLLRSWGYLTPKLSLTHLYTSYDEDSLADQNIAKKNGRHSVFAPTVSLDAGLFFEKAGAPFGMHQDTGGYQVLTPRLHYTYTPFKDQHNVPNFETKIAQLSYEQLLNNNWFLGHDRIQDLHAVTPAVSYRYIDKMGRTRFEGGIAEQILLSHIRVGINDSESYSSRSSGLAWQASLQPKDNLWFDASGSFRTNYDLSSIVAQIRYRPSDRKLFNLGIVKRKENRAFNQSALSAYTASAIFPINNRWRMMGQLQYDYNLDYVMDSLMGLNYEDCCYGLSIYARRYRDAFNPHLSPDTAVMAEVRLNGIGGGGRLNRLLSEKVLGYDQVQNAWRHDY

SEQ ID NO: 347 - protein, 346 aa, Moraxella catarrhalis
MSDVRHTQMMEFLNANLATDFRVESLSGDASFRRYHRIYLPMRGEVGGHEMTYLLMDAPPDKESIQDFIHVAGIMSETVNVPDIMACDEAMGFLLLQDFGTVEFAHAIAKDTDNKDGYYTKALQTLAQLQTIKGADLPKYSNEKLAQEMDLFSEWFLPYLGIGLTQKDAQKWESLKQTLIMQINKQPQVIVHRDYHSRNLMMDKGSDHLGVIDFQDAVIGAYTYDLVSLVRDAYIDYNEVWAQKRIHEFYQLIKPSVDLGTFISQTNIMGIQRHLKVLGIFIRLSERDGKHRYLKNIPKVMSDLVAELSWLSERSHDAIYGEFMAWLKNSVLPAYSTKFGYLSERL

SEQ ID NO: 348 - protein, 542 aa, Moraxella catarrhalis
MTHHFRSLFVISIHTVMLVLLVGCKNLPDTPHLPKSLALTKQVQERHQMVKHGGSSDGLISAINAQSHHHPNQSGYYPITTGANAFAARSTLTDVANQSIDIQYYIWHNDEAGQLMLKDLWEAADRGVIVRLLLDDFNSSPELDQLLLRISKHKNIAVRLINPMPYRGFRSLNYMLHPIRTNRRMHNKSMTFDNKISVIGGRNIGNEYLNNAPVNHFADLDVMLVGHVVGKITQSFEIYWASPLSFDIETLVKHDNKDDISGIKPVVFDELEKVKDSSDADRELRTYRQAMQNSTIGQDLLAQQVPFFWTEIDLIADNVIKLNGHSDPNEFLVSQLQTQLGQPSKKLSIISSYFVPTKEGIDTLITLAKMGVEVRILTNSFDATDVGIVHAGYAHWRKQLLAAGVHLFEIKSSAQSIQDNENRFWRTRQHSTTSLHAKAFAVDDDQIFIGSYNVDPRSANINTELGVLIKDSKLAGQLHKALSNSQAITHQAYELKLDAKGNINWHTIENGQPVILHHEPHMNHKDRIIIWLAGLMPIDWLL

SEQ ID NO: 349 - protein, 594 aa, Moraxella catarrhalis
MIKVLISPLTIPIIWGFMMKSNKPFKLRELISTQVWVWILAWLLGLVTVWSVLGLSMVSGWFVTMSAVAGLVAVGTHTFNYMMPAAIIRTFAIARTLSRYGDLMVSHHAVFGLLKDLRVRFFADWASLDFNARNLQRQSSSQKMHRLVKDIDVLDEFVLRLISPWIMAIGAVILVAGVTLLLLPKAWFGLVPIGLAILIAAFVVYRGIHLAYDESTILETRKSKLLDTLPALTSLLIWHRWDAYIHQLSDLDAQQTKITLSSHRLRRMGMLGVQVALALAATLMLWGVGRFFRQTDSVAFTIETLNDYPMMSSAVALAVFLGLMGLGEFIQNLIAEPLALGRSQVAKQRLNEMLVGQNAAPKINFNQITNQQDALTLWLNNAIVRAPNAIISAHIHHAKIRSDKPCLIIGPSGAGKSTLLHTLAQEHDLTSGEIWLCTDTKKYPWQSVDFDQSLGFLGQTVDIFDQTLADNLRLGKPNATDDELITALKKVNLLTWLNNQPKGLATRLGEYGMAVSGGQARRIALARLLLSPKAVMMLDEPFAGLDPDTRHNVWLSLIDAQKSGDIGLLLICTHQLWQQMGEVQVIKIEGEGQV

SEQ ID NO: 350 - protein, 437 aa, Moraxella catarrhalis
MTLSSYLKINERGSSVRQEIIAGLTTFLAMVYSIIVVPNMLSAAGFPAESVFVATCLVAGLGSILIGLWANVPMAIGCAISLTAFTAFSLVLGQGVSIPVALGAIFLMGVVFTLISVTGVRAWILRNLPASIAHGAGIGIGLFLLLIAANGVGLVIKNDTGLPVTMGEFMSLPVILSLVGLAAIIGLERLRIKGSILWVIITITMIGLLFDPAVKSDGAILKVPSFGSDSLFMQMDVMGALNTAILPVVFALVMTAIFDATGTIRAVAGQANLLDKDGQIINGGRALTSDSVSSLFSGIFGTAPAAVYIESAAGTAVGGKTGLTAIVVGVLFLLMLFFQPLAFLVPSYATAPALMYVGLLMLSNVSRLDFEDFVGAMSGLICAVFIVLTANIVTGIMLGFGTLVLGRLISGEFNKLNLGTVIIAVVLVAFYALGYAI

SEQ ID NO: 351 - protein, 232 aa, Moraxella catarrhalis
MKTKAILIGGSSRVGEALAQELALIYESVILITRTQPRAMSANMQVYHVADFRALASTIETVAIGADTDAFSCLGVSKQQVPSHDEFYQVNVLYNLEFAKACKQKGVQQFYFLSKEGADTPNHDDELTAKADVEYDLRTLSFDTLAIFRLYRLTLPKHRLSLKSLGSQALNGVLSTLNKNKRALEPKQVAACMAITAYKHNHQPQLRTPNQATIITHEQMLNSVIRPNKKSK

SEQ ID NO: 352 - protein, 221 aa, Moraxella catarrhalis
MRLPKPFSQAHKISPCLGATTKDTTRLTAKSSPTSSPSSSNSSSSSVVASRFTRIPRTPLATRLMARILCSLKRMALPSLLNSIISCSPSVIATPIKVSPSARSIARKPPARRLANCDKATRLTVPDAVAKNTKLFSSFRSLTGKIAVTNSSDSRLIKFTKGRPFEPRLAIGISNPRNLKTRPVLVKHKIWACVLVTNKCSITSSSFMAVAERPLPPRFWA

SEQ ID NO: 353 - protein, 473 aa, Moraxella catarrhalis
MISVFELFKIGIGPSSSHTVGPMVAANRFLVLLGDRMDSVRQITIELYGSLSSTGKGHATDTAILLGLSGHEPPTIDTTRTEEYLKPIYQEGRLMLGGTHQIAFDANEHLLWDDTPLPEHPNGMKLIAILDDGEQLAQTYYSVGGGFIKDEQQIHLAPSQDTQSAYPYDFDSAEELAALCQAHDLSIADLMLANETALRDIDDVKAYLNDVWDTMQACVTQGCKVDGILPGGLNVKRRAKDLYEQLSKEYGYSGNGGLLAMDWVNLYALAVNEENAAGGKVVTAPTNGAAGIIPAVLHYYRGFIPAFSYQGVREFLLVAGAIGALIKQNASISGAEVGCQGEVGSACAMAAAGLAHVLGGSVAQCLNAAEIGLEHNLGLTCDPIAGLVQVPCIERNAMASVKAINAARLALRGDGSHHVSLDKAIATMKETGMDMMDKYKETAKGGLAIHATNAMKTAQRIDAINISSGFSQC

SEQ ID NO: 354 - protein, 383 aa, Moraxella catarrhalis
MNTMRSTSITIHPNALTHNLQIIKSQLDRTTKVLAMVKADAYGHGIDATIPALIHADGFGVACLSEAMAVKQVLDGMNVKKPIVLIEGAFSLDEWKVAIDHDFGCLIHHENQLTWALSHRPKQDQFCHTIWLKYNTGMSRLGFNDDHIITAAKSLADAGYRLILTSHFACADDKSHPLNAQQISKFDQALACIRSFAPDTLASLCNSAGIFNFKHQHHDWVRAGIALYGSKPITDQSAKALNLMPAMTLSAQVMAIHTLAAGDSIGYSALWAAQKPHQIAVVSIGYGDGYPRVVMGAKVSVTDTSGNRHLCDIIGRVAMDMFMIDIDGLDIAINTPVVLWGDSPTIDEVAMCAGTIGYELMCRLTTRPKRCIMDTYLPKKEFK

SEQ ID NO: 355 - protein, 464 aa, Moraxella catarrhalis
MNSDTLLTMRPIKAVAIAGVLVALLGLTMIAWSWVPHLSLLVVIAALLFFGLLNKLKFEQMQACMIGSVGSAMGAIYLFSFIGLLVSALMMSGAIPTLIYYGFEILSAKVFYLSAFILSSVVGIALGSGFTTCATVGVAFLGMATAFGANPAIVAGAVISGALFGDKMSPLSDTTSIAASLVGVDLFDHIKNMMYTTVPAWVITAIIFWYLSATNTISDLAGIAILKEQLFSSGLVHGFSLIPFAVLVILAILRVNAIYTIIATIITALMITYTHSSPSLTDLGGWFFAGYTPAEELALGDVAKMVSRGGLQSMFFSQLLVILALSLGGLLQGLGILPALLDGMRHLLTHASRGVAAAAFTSLGINVLVGEQYLSLLLSGNAFLPEYQRLGLHPINLSRTIEDAGTVINPLVPWGVYGGFLAGTFGMPVIEYVPYAFFCYWCFLLTLFFGITGLTITRLSPKLT

SEQ ID NO: 356 - protein, 386 aa, Moraxella catarrhalis
MKFIKQNSHHLAMLLAMTTGAHQAHAFSVDNSQQRITVQPTYVQPAQVITSQSVYVEPTAQVTTTTNVSVQAVPQAPQEHVVSQEGYAQTQLNIQPQVISSTKTQTTAYTTTSNAQTAILNDQNSYTNSFYALPISTRSAAVLVYDLQDGKLIYGKNADVQRSIASISKVMTAMVILDAELDMREEITLIASDLIGAKQASTRLKAGDRMTRSEFTLMMLMRSENPAAKALARTYPGGYDAFIVAMNQKAYDLGMYQTKFSDSSGLDPRNMSSANDLLIMMKAVNSSPRYHSIRNFSTAPHYDFYIANYGSGDRIYKGNNTNRLVREGAYPIGVQKTGYIREAGYSVVMETNINNRPAIVVLLGASNSANRWSDAETILTELAYRQ

SEQ ID NO: 357 - protein, 819 aa, Moraxella catarrhalis
MKKHTKSSISTQILKPLSLAISSCILVACSSTGTPAKPVSQTPKPIPQAKPSQQINISSGNTNLGNTKTGADVDVLDVQMLDALEALLQATDMSMVEGDELAIQRYGNLWDRVRRGYRINEMTNARIEAQKSWFYTRQTYLDRLTARASRYLHHTVAEAERRGIPSELALLPIIESSYDPTATSNAAAAGLWQFIPSTGRIYGLNQSATYDGRRDVIESTRAAYDFLTSLYNQFGSWELALAAYNAGPGRVSRAIKANQDQGLPTDYWSLKLPTETMNYVPRFLAVAQIVRSPNTYGINLPAIANHSHFRTVPVNYGVSLSEVATVTGLSVSELRLLNPALLNFTVDEIGPNRIVIPDSLPNQIDNQLASLKGYGFGGDYIATAPAQSITYVVPKSGATANTSSQQELIAANTLPTTIAQVTPNNTIVQEPALSKSEINLIAAEIQKTSPEVPAISPQDGNIQLNAVQTGQSVLDARGETKMLSFADGPKTQAVAQQPTQPVQVAVTPPAQPVQITVVSPTPEPISQPKPQLPPVTASIPVVSSPPVLVPPPPSRPRPEPASRPKPKPESYTVRAGDSLTSVAATHGLTVGQLASYNNLANDAHILIGQRLWLVAGKVKRQPVSAQQTSQATQSTKNNQSTQSTATHRVQSGESLTAIARRYNISLHALAKENGLSVTDGVLIGQTLKLPSDAKAESSTPSRLGNTKNNSTRTPANTNIGITENYTVRSGDSLTMLSNRFGVAIGDLATANGLASNANLRIGQTLKVPKLTTTYTVKAGDGLIALARRYGISTQELAKMNNLEPTADLRIGQVLTVPNK

SEQ ID NO: 358 - protein, 472 aa, Moraxella catarrhalis
MAKAKSSYICQNCGAIYGKWAGQCTDCGEWNTLVEAPNTSLPHHHKSKTTTAPRKTANYAGAVSAVMTLDHVGVTLETRMPTGIGEFDRVLGGGLVAGSVVLIGGDPGIGKSTILLQTAINMAAGDSLSGSALYITGEESLSQVAMRAVRLGLPTDRLRVLAETNVDTICAALTTEQPAIAVIDSIQTLFTEAIQSAPGGVAQIRESAAVLTRYAKQTGTALFLVGHVTKEGALAGPRVLEHMVDTVLYFEGESDSRFRMIRAIKNRFGAVNELGIFGMTDTGLKEVANPSAIFLSRYDKPIAGSVVMVSREGTRPLLVEVQALVDDSQGQPRRMALGLDYQRLSMLLAVMHRHGGIHTSGMDVYVNVVGGVKVMETGSDLAVLIACASSIKEKPLPVRLCVFGEVGLSGEIRPVPNGQERLKEAMKHGFTHAIVPRANAPAANHPQFKNIQIIAVDRLDEAIYQAFEINAG

SEQ ID NO: 359 - protein, 148 aa, Moraxella catarrhalis
MTMMMKNKWMRGLAILVLSLPTVTYAKTAAPKASEAPEVSLTQEEQMAIDFCDFSAYGVMHIAGDHQGGATKSEALTNHDKRMAELKDLIDLDPETATMLDKYWKGAIDRIFQESVQKTDAEKQAFVMGVGESSFYSCLDQVLKTPKN

SEQ ID NO: 360 - protein, 1328 aa, Moraxella catarrhalis
MGGFLLGEFMSNTYRLDIQVNADSANTALGNLKEHFDKIEQSSGKAGVGIDGFSDKADKASKSSKKAGDEAKKASNAQKGLAASFKEATAVAAVGFAAISGTVALSIGKANEFESALAGISKVVDFKSPDGLKDMRAELEALSTQIPLTFTELAQITAAGGQLGVAEENLIAFTKLTADMATAFDISAESAGDSMAKLANIFSKPIEEMGEFGDMINTISNNMPAKASEIVESLTRIGGTAKAFGLAEKEAVALTSAMISLGKAPEVASTAINSMLTTLSTLDVADKDVAASLKAMGLNAQEFGKTIREDGYKAIMQLLEGIEQLPKDQKIGIVTDLFGKNFGDDIVQLAGAPDVLEKINELLAEQQGYIGSMAQEAKNVSSTSEARNQMFLNSLENASAALGEVFKPALDSVRDAVIPVLNAFADFTKENPTFVAAIVGIAGAFTGVLTILGGVLAVLPILASGWAILTAGATVAVAPILGVVAAIAAVVAVGALLYDNWDLIKAKGQEIWAAVSDYASQAWESIQQAWQGIGEWFGRLWGKVKQTFFNWLSQMPKPVQEMVANIGEIFSTIGEVVGAVWDGIANIAKSVWHAITEFVSYAIDKIKPIIKSVLEFFKNAWDGLVSIAKTVWQAVVSVVSHVFDKISGIISTQFEAMKAIFMAGVTIFASIFNAGFEMVKTIFSTAFKVITAVLTGDMQGVKDAIKDGFQKAVDILKKLVGNIVDALKKLGKDLLQVGRDAMQGFINGISEKIDAAVSKAKEMASSVKNAVTGFFDIHSPSRVMKQVGGWISEGLAIGIAYKAPIAAKEAKNLAKSVKNALESDLQKTAEEIFLTKQHIKGNPYAQLTKDIAFGKYGKQDTSRLQKLAQEQILQSNILTLTQQLHEAQQNLANVGLTSIEIMQRQYDETDKSVRASLDLFEQVKKTSQELIDATNRHEATQEFESTLKDIKKQMAIMGSQDPLAEFLYDLQNAEKYAYYTTEQLATLKDEMIKLQAAKDAKQASDGIEESLKDINKQLALLGSNHPLDDFFYELEQTDKYAHATTDEINELIDAIFKLQNAKDALNAKQAFDTLMKDTALANETPAQRLQREYDEKMAVIDRYEQMHSDKLENATSLRQQITERYEQAEKDAKVKNYQEHLTAFAGFLKNTAGEQSKAYRVMFAASKAYALADVGVKMGKAVADAWADPSAVTIWQKLANVAKVSLEQGHVLSMINAISPKGFATGGYTGNMGINQVAGVVHGQEYVLNAKATKRIGVGNLERLNRGDGIGGHVNHINVHVTVNSDGSNVQADTQMGKTMGEAMAKIARQVVIQESKQNGHLDRLYRR

SEQ ID NO: 361 - protein, 254 aa, Moraxella catarrhalis
MLDSTQMETNMQLKTDENGNVVVQDGKPVYMYDDGQEIAFDAMQNMAKISQLNAEAKQHREAKEKAETLLKAFDGLNADDAKKALETVKNLDDKRLIDAGEVEKVKAEAKKAFDEQLAEKDAQINKIKQEYNNAVIGGAFARSSFIKDKTLLPSDIVQSSFGSHFTMENGKIVANLGGNPIYSRKNPGELADFDEALETIISQYPHKDSILRGSGASGAGATQAGVGKNTPKSLADCKTDEERVAWLNEQNNGE

SEQ ID NO: 362 - protein, 240 aa, Moraxella catarrhalis
MTPEIRLKNLTLVLEKIEKEKGLNSFAKIAKEYDLNASYLSQLMNGNRQIGERSARSLEKKLKLEKFSLDNCPLQSNINPDFESITEWDNGAPLDDDEAEIPFYKDIAFACGHGAVNGDAPLEGRKLRMGRRTLSNLGVMPINAYAVTACDDSMTPYVQDGDTIYIDKGRKEVKDGRIFAIRFGELCLCKRLYRLPDGGVRIVSDNAAEFPEQVATKQQISDGEFEVIGWVWSVSRLERW

SEQ ID NO: 363 - protein, 378 aa, Moraxella catarrhalis
MTTTPKPKTATTSSTTATTVPKKTTSTRTKVSTATETKPKPSKAEAIMTQTVGQLEELLEHATPEELAEFGEALKEYLPTTHVISQVRTDKSRDTQLSDNWREGGYPYKYRLSRKNYEAQKYKLQIELLKLQHHIKTTGQKLVIIFEGRDAAGKGGTIKRFMEHLNPRGARVVALEKPTEQERGQWYFQRYVQHLPTAGEIVLFDRSWYNRAVVERVMGFCTDEEYRIFMHQVPEFEKHLVESGIHLVKFWFSVSREEQRVRFASRENDPLKQWKLSPVDKASLNKWDDYTLAKEAMFFNTDTAEVPWIVIKSDCKKRARLNAMRYVLNKLTYENKDIAQIGNIDPLIVGRAGALYEMDERTDLTVSTQLPRKTTTTK

SEQ ID NO: 364 - protein, 485 aa, Moraxella catarrhalis
MMMPIVIGKMRLFLEVFMKNQSATHWALSVMTISVLLSACTSHVVHERAPIKVVQVTPNPAQVAPPAQVPAQALTKVPTSTVQPTTAKPASVVVQKSVVVQKPAPTNTPSMTSQSHYATFTEWKHDFIHRALAKGINANSLNSLMGNATLNQRVIELDRSQAEFTKMPWEYVESAASSNRISQGRSKLNENLSILTSAESIYGTPKEITAAIWGMESSYGAGMGSMDLVSALSSLAYDGRRREFAENQLLAMLLMIERGDVAASQLKGSWAGGMGHTQFIPTTWIQESIDGDANGRKNPWNRQDALTSTASYLANAGWIRGLQPFYEVRLPTGFDFLQLNSKRSLDAWKALGLVSASGEYFGGVHEAQLWLPAGQYGPALLLTKNFEVIRVYNNSSSYALGVSLLAKKIAGGHDLVQSWPRHEQPLSRTQIINLQKNLTAQGYDTQGIDGVAGSNTRQAFARWQAANGQIPDGFISQRTAGHLVW

SEQ ID NO: 365 - protein, 470 aa, Moraxella catarrhalis
MKLMPLAFVIGAAVGLSACQSLDHTQNAISTTKTPSTQAEHHDIYTQTLKNGLKVIIKQDSRAPIVMTQVWYDVGSSDEPIGKGGISHFLEHMMFKDAKGVSHDDYQRLISHFGGELNAFTSDEFTAYYESLPANQFPLALQIEANRMNNLILTAEEVATEKQVIKEERRLTTDDKPTAKAHEEFLAIALPNSPKGLPIIGSMPEIEAITVTDLQNWYDQWYAPNNATLVLVGDIDPKTALPWIEKYFGTLKPSSLPKRTPLSQPSHRGYTQANSYQNVKVPSLIMGFNVPTLGSRTIKNHTKEAHALSLLSDIADGGLSARFERHLIRKLQILNSVSIRYNMLSKSDDLFTIIATPREGVSLADAEAAILAELNAITNDQITDDELARSRAGLLSSLVFANDSIAKQASNLGALSALGLPLDTLDTLPKALDKVSKSDIQAVGKKYLTKDNLTTVYVLPKNTQSPSDTH

SEQ ID NO: 366 - protein, 488 aa, Moraxella catarrhalis
MDTDMKHLTKHRLSAAIIGVLLFISPSVQANTTHHHTLTSSELKLADDSIIDSINQLGELTVNIPNTQYFQTNNGVSVAFTPLHELPIVDISLYFNAGSAYDHQVGKSGTANMVATMLTQGTDSLSEDEFVAAKERLGIDFTSTANKDNLTLSLRSLSDQSLLNQAADLMVDAVTQPAFDDKTLQRNKNQLITSLKQKKQNPYHVASVAYHQAVYENHPYAHATTGDEDSIAKIDRDELLNFWRTFINANNATLVITGDMTAEQAKSLANHLTAKLPTGKSYKNTLDLTKPVKARHIHIPHNSSQTQIIIGHPTSKVRTDKAGRQEFSDFSLGNEILAGGDFNARLMKTIREQKGYTYGIYGGMERLRAGGNYVVEFSTDGDKAADAILETLHIINESLNEGVTQEELELVRLGNKNGFANIFSSNASIHRVIGALFVADYPKDHLNHTLNRLDNATINSVNTALNLRIKPDEFIIITVGKTKPNLDK

SEQ ID NO: 367 - protein, 339 aa, Moraxella catarrhalis
MLLLWPVFLMNEMAMKQNNLAPSDYIQDAIDAIRTEQRALELLIDELDERFVNACQTILNCSGRVVVTGMGKSGHIGRKIAATFASTGTPAFFIHPGEAGHGDLGMLVQGDVLIAISNSGESDEIRMLLPVVKQLNIPLISISRDKRGILPRSADIALTLGLSEEACPLGLAPTSSTTATLALGDALAVALLHARGFTSHDFALSHPAGALGRRLLTRVSDIMHTDHLPVVHHQSSLNETLLVMTSGRLGLAVVVDDDGKVVGIFTDGDLRRKLAEHTNLTVEIQTLMTKTPKSVDQQMRASDALSLMNENAISQLLVLKDRQLIGVISIHDILKAGIS

SEQ ID NO: 368 - protein, 557 aa, Moraxella catarrhalis
MMEIKAPDLGVESAEVAEIMVKVGDSVSENDNMILVESDKASVEVPSTGAGVIKEIHISVGDHISEGDLLFTLDSDQSGDAQKTDSKSDDEPQIKQSAKDEDDISIGDDEQTDDQPDLNESAGSQTHHLPDLGVDSAEVADIMVAVGDEITKDQPLILVESDKASVEVPAPVDGVIEEILIKAGDSVSNGQAFITIKSKGISAKKSSNKEQPAEKTKEEDTKANQAAVSESKNKSVQSPQTKLPEAVVNEKARHVYAGPAVRKLARELGVDISAVTGTAAHGRILKEDLFGYVKSVISGSTSQAKSGTTEVRSGLPSLPDMSNKEIWGELEIQDLTRLQKVSIPQLNYNTYLPQVTQFDLADITDTESLRNELKGEFKAEGIGLTILAFIVKAVAYALTQTPKFNSHLSDDNTQIIIRKSVNMGIAVATDDGLIVPVIKNTQDKGIKQIAIEIGELAKKARDKKLTAKDLQGASFTISSQGNLGGTAFTPLVNWPQVGILGVSEASYQPRWNGKEFEPRLMLPLSLSYDHRVINGADAAVFTRHIAKLLADPRRILL

SEQ ID NO: 369 - protein, 579 aa, Moraxella catarrhalis
MTIHHLNRTVLDRLRLIFKVNIMVSFAELFEASQSEQGLNIERGSVISGTVVAIDSDWITVDTGLKSEGIVAREEFLNEAGELEVAVGDSIDVVVEAVDNGMGQTVLSREKAKREESWRALEQLHENDEIVKGVISSKVKGGFTVEIGSVRAFLPGSLVDVRPVRETTHLEGKELEFKVIKIDKQRNNIVVSRRAVMEAENSAERDELLAKLEEGMEVEGIVKNLTEYGAFVDLGGIDGLLHITDMAWKRIKHPSEAVEVGQDLKVKVLKFDRERNRVSLGLKQLGADPWTEVEQTYPVGTITKARVTNLTDYGCFAEIAEGIEGLVHVSEMDHTNKNIHPSKVVQVGDEVNVMVLEIDGERRRISLGIKQTMPNPWAEFDKNHEKGQKISGTIKSITDFGLFIGLEGGIDGLVHLSDISWTESGEEAIRNYSKGDTVEAVVLSVDAEANRISLGIKQLNSDPFNEYLLSNDRGAIVKGTVKEVDAKGAVITLADEVEGYLRVADIARERTEDASKVLSVGDEVEAKIVGVDRKSRNISLSIKAKDEADERQAIKELSNTAAETQPKTLGDIFGEQLKG

SEQ ID NO: 370 - protein, 647 aa, Moraxella catarrhalis
MALIHLKNIHLAFGTAPILDGVHFTLKPNERVCLIGRNGEGKSTLFKLIMRQIHADDGEVLIKDGTKIAMLAQDVPNESASVLDVVMEGDDKVAQALKNYHQASAKCAMGDNEACDVMSGLQQTLDALNGWDLERRARALIDSMGLDADACLSTLSGGRKRRVLLAQALVTNPDVLLLDEPTNHLDIESITWLEKFLLNERLTVLFISHDRKFIDTLATYIIELDRGQLSGYDVTQGVGGYARYQELKALELASEEKSFAEFDKKLAQEEVWIRQGIKARRTRNEGRVRALKAMREERKARRDVLGTVQISQNNSEKSGKIVCEVNHLTLEYDNKTLVKDFSTLLVRGDKVGIIGKNGVGKTTLIKSILGLDDSAIQSGSVKLGTNLNIAFFDQLKDDLDPEKSIADNVSEGSDHVDVGGKTTHILSYLQDFLFTPNRARTPVKALSGGEKARVLLAKLLLKPANVLVLDEPTNDLDMATLELLEDFVVNFKGTVLLISHDRAFMDNVVTQTWVFDTDKYGDGIVLEYVGGYEDYVQQHERWLAHHATDNKPKATKPAEPIQIKPPQSGVAQKRKLSYKEQRELEDLPNEIAALEQEQAQLAKKIEDGSWFNTDLAAATKAGERLVEIDELLMMKLERWDELENMTQ

SEQ ID NO: 371 - protein, 758 aa, Moraxella catarrhalis
MTHIDTIKVTKRDGRLEPINLDKIHRVIAWAAEDLNNVSVSQVELKSHIQFYEGIRTRDIHETIIKAAADLISVETPDYQYLAARLAIFHLRKIAYGKFEPPHLYAHVKHLTEQGKYDQHILADYSIDEFNELNDYVDHNRDMNLAYAAVEQMMGKYLVQDRVTKRVYESPQFLYVLVGMCLFAGYDKAQRLDYIKRFYDATSNFYISLPTPIMSGVRTPTRQFSSCVLVECGDNLDSINATTSAIVRYVSQRAGIGVNAGAIRALGSPIRGGEAQHTGCIPFFKMFQAAVKSCSQGGVRGGAATLFYPIWHLEVESLLVLKNNRGVEDNRVRHMDYGVQINKTMYARLIKGTDITLFSPSDVPGLYEAFFADQETFERLYTQYEADENIRKRKVPARDLFSLMLQERASTGRIYIQNVDHCNTHSPFDPTVAPIRQSNLCMEIALPTAPLDNINDEKGEIALCTLSAINLGKIEKLSDIEEPAELIVRALDALLDYQDYPVIAAKKGSTNRRTLGVGVINYAYYLAKNGTRYSDAAALGLTHRTFEALQYYLLKASNKLAKEQSACPWFDQTKYSQGILPIDTYKKDLDSICTEPLHLDWESLRTNIKAYGLRNSTLSALMPSETSSQIANATNGIEPPRGLVSIKASKDGILKQVVPEIERLASQYELLWNIPDNNGYLRLVGIMQKFIDQSISANTNYDPTKFEGGKVPMKVLIQDLLTAYKFGVKTLYYHNTRDGADDAQGDLDDGCAGGACKL

SEQ ID NO: 372 - protein, 346 aa, Moraxella catarrhalis
MIKKRGLGMNRGLDVLLGNISAEKKIIAGAQSLVASAASEQTETKPTASTKTTKINKAKADKKAGNNNPALEAGMGEKVALVQIATNRLQSGKYQPRRDMNEAALNELSLSIKQHGVMQPIVIRPLLSDESKSSDTVTHEIIAGERRWRAAKLAGLETIPAIERVLSDEVAIALALIENIQREDLNVLEQAAALQRFHTEFGMSHAMIASVVGKARTTVSNLMRLNHLHDQVKQYMIDGVMDMGHARALLSLSQEQQPIIAKKIVDGGMTVRDAERLVKSILDPNPKLIVQPNHEVLALSQQISDALGAKVKLKQGKDGKGSVEIFFYDHDEFGELVNRLCQISDY

SEQ ID NO: 373 - protein, 793 aa, Moraxella catarrhalis
MKDNAYHRLKNNYRLQACDLKRYTDPNHLPKSSRLHLPKPDIAFGQSRAIKALNTALDIHANGYHVFAVGENGLGKRTLVTRLLAERAKHMPTPNDWVYVHHFEDIRRPIAIDFPAGMAIIFQQKVHKLWQNAKKKLVAKLLGDTHQNHIELIKSAIPLQQNKRFDAINADAKQHNLVLKTTGDGRVHFVAIDDSKPIDTKKLAQLQKQLLEAQIELSELEDSTHEALDELHQSTAKKVLEPMFNAVMANFENHPKAIRHLMAIQDDMVKNITHIINEDDDNFIATSLSQVPSRYVVNILVSHQPSAGAPIVFEDLPTHLNLLGHIEYTTELGTVLTDVSMIRAGALHKANGGYLLLEAQSLLEHPYAWQGLKRALQSKQIKISSLEQMLTLTGSLSLEPDSVALDVKVILLGEADLYYELLEFEPEFNSVFKVRADFHDDIQRDDCSEYGMVLKMVDMIKSHQLPNFDNTAFAVIIDELSKLSDDKNKLDLHADRLSGLLVESARIATLENNKIVTAKHVQTALDDITERKGYLKDLYWQEILNGQQIICTKGWAVGQINALTIISYADSEFGLPARLTALIQPNFGQGEILDIERDVELGGSLHAKGMLIMSSFLRALFSEFHELNFSASLAFEQSYGQIDGDSATLAEACALLSALANIPIAQNLAITGSMNQLGQAQAVGGVNAKIAGFFDACRDKGLDGNQGVILPRANIAQLMLRDDIVQAVKDEQFHIYAIDHITDALALLSGMLIDDKNKHGEYKRNTLFGKIVKRLESWVQDDKDDKDNRTAKN

SEQ ID NO: 374 - protein, 429 aa, Moraxella catarrhalis
MGKNVVVLGSQWGDEGKGKIVDLLTEKATAVARFQGGHNAGHTLVVGGEKTVLHLIPSGILREGVTCFIGNGVVLSPEALLKEMNGLIEKGVPVRERLRISPACPLIMPYHTALDQAREIKRGSGKIGTTGRGIGPAYEDKVSRRALKVADLFRADLPEKLENLLEYHNFALTEYYKVDAIDFDTTLKLCQEWASDLKDLVIDVTDALEIRRQNGENLMFEGAQGTLLDIDHGTYPFVTSSNTTAGGVSTGTGLGPLYLDYVLGITKAYTTRVGSGPFPTELFDDVGAHLAKVGHEFGATTGRARRCGWFDAVSLRRAVVLNSMSGICLTKLDVLDGLDEINICTSYEVPEGECAGAYDAEYYEKVVPKYETLPGWSESTIGVTNFDSLPANAQVYIKRIEALVGCPVDIISTGPDRDETIVLRDPYDA

SEQ ID NO: 375 - protein, 519 aa, Moraxella catarrhalis
MKPASYDVIIVGSGLAAITTALSLPKDCQVLLMCKGEIADTSSRFAQGGIAAVIAPTDSVQEHVTDTLIAGAGLCDPNTTEQIIHQGADAIAWLSSLAVPFSTTKEGLHLTKEGGHNRRRICHVADHTGQSVMACLWANMQTRPNIHVLERCFVTDILTELDVKTKKVHCKGVVCLINQQSKKYDADKVVLATGGLGQIYQYTTAPEVCTGDGIAMAYRAGCRIVNAEFVQFHPTGFDDGMAQTALISEAVRGEGGRLINAQGERFMSNYDERLELAPRDVVARSIIKEAQRTAQGVFLDISHQSDEFIKQHFPKIYQSCLAKGVDITKQPIPVTPVQHYFCGGVLTDVSGRSDVVGLYCLGEMAYTGLHGANRLASNSLLECLVMGQNAAKSLQEPLAKWSNRDVLPNWSVQTHQKDINLASSIPLDVAQIKQLMQQHLGVMRRQEDVAKTVELLAGGLADLSTQNLTTQSQIQKLNLTMCAYLVAKASLDRPHSIGCHYWVENEPNLIAPNRLPKVV

SEQ ID NO: 376 - protein, 285 aa, Moraxella catarrhalis
MKTPLFALPDALLIPTVQAALLEDLGRRGDVTSAAVIAKNSTANLAIVSRDTGILAGMDLARLAFECIDKTINFSPNASDGDTIKSGQVLAYVSGNTQALLQAERTALNFLTHLSGIASMTAKAVAQISHTQAKITCTRKTTPLLRNLQKYAVRAGGGCNHRMGLDDAILIKDNHLIYSGTLKQTIANAKAAAGHLIPIEVEVDTIAQLEEALEAGADFVLLDNMDNDTLKHAVSLCQGRAKTEASGGITFERLKTVADCGVDYIALGYLTHSVINHDIGLDFLD

SEQ ID NO: 377 - protein, 498 aa, Moraxella catarrhalis
MNQPTNQSTTQPSSIPLNCPNLLKQACLIDGEWVGADSGEAIAVTNPFTGDVLGTIPSLSKQTVLNAVECADAAQESWANTTASERAKLLHAWADLIDTHKEDLALIMTYEQGKPITESQGEIDYANSFIRWFADEGKRIYGDVIPSTNQSLRYVVLKQPVGVCAAITPWNFPSAMIARKAAPALAAGCTMIIKPATETPFSALALGYLAKQAGIPKGVLQIVTGKSSVVGEVLTKDPRIHKLSFTGSTEVGRVLMEQCASTIKKLSMELGGNAPFIVFDDADLEKAAEGLIASKYRNAGQTCVCANRIYVQSSIKDEFLAKFKQKVEVLKVGNGADEATDIGPLINQQALKKVQALLDDALNKGATLITGGVPHDASQLSFTPTVISDITDEMDLAHEEIFGPIAPIMTFEDEKEVIHHANDTIYGLAAYFYTQNHARAWRVSEALEYGMVGQNTGLLSTEVAPFGGVKQSGFGREGSKYGIEEYITTKYWCMDISK

SEQ ID NO: 378 - protein, 272 aa, Moraxella catarrhalis
MSKSNAQTPQPQNKQEHVMTATIKSAIKPLFIAMMVMGATSAHADLTVYAAASMTNAVEDINKLYEKKYNSKVKTSFAASSTLAKQIEQGAPADIYISANTSWMDYLAKKDKIVSSSYKNLLGNRLVMITPKNNPIKTNIKIDKSFDIGNAFTGKLCTGNTASVPVGKYAKEALTNLGWWDTIGPRLVETEDVRAALNFVNLGECQLGIVYATDAKVVKNVQVINTFPITTHTPIVYPISMVKQSREAQQYYNFLQTKEAKAVYRKYGFSVL

SEQ ID NO: 379 - protein, 512 aa, Moraxella catarrhalis
MKIRSQVGMVLNLDKCIGCHTCSVTCKNVWTSREGMEYAWFNNVESKPGIGYPKEWENQGKWKGGWIRNADGSINPKIGGKFRVLANIFANPDLPMIDDYYEPFDFDYQHLHTAPIGEHQPIARPRSLITGKRIQKIEWGPNWEEILGSEFAKRRRDKNFDDIQADIYGQYENTFMMYLPRLCEHCLNPTCVASCPSGAIYKREEDGIVLIDQDKCRGWRMCISGCPYKKIYYNWKSGKSEKCIFCYPRIEAGMPTICSETCVGRIRYLGVLLYDADKIHEVASLSNEQDLYQAQLDIFLDPHDPKVIKQALQDGVPMSVIESAQKSPVYKLAVDWKLALPLHPEYRTLPMVWYVPPLSPIQNAAEAGQVGMDGLIPDVDSLRIPLKYLANMLTAGDEEPVRLALKRLLAMRSYKRLQLVEKQDAQEVLDAVGLSVAQVEDMYRYLAIANYEDRFVIPTAHREEALSDAFAERNGCGFTFGNGCTGGNDTHMFGQKKNNKRDFIKTVQTWEL

SEQ ID NO: 380 - protein, 1251 aa, Moraxella catarrhalis
MSHLLDQLRFFKRKQGEFANSHGETRHENREWENSYRARWSYDKVVRSTHGVNCTGSCSWKIYVKNGLVTWETQQTDYPRTRPDLPNHEPRGCPRGASYSWYMYSANRLKYPKVRKPLLKLWREAKAKHTDPVLAWASIVENPTKSAEYKSKRGLGGFVRSSWQECAEIIAAANVYTAKTFGPDRIIGFSPIPAMSMLSYASGSRYLSLIGGACLSFYDWYCDLPPASPMVWGEQTDVAESADWYNSDYIIAWGSNVPQTRTPDAHFFTEVRYKGTKTVAITPDYAEIAKLCDLWLNPKQGTDAALAQAFCHVIIKEFYLKSQSDYFQDYAKRYTDLPMLVVLEEKDDKFKAGRFLRASDLIDNLGQENNPEWKTIAMNQNGELVSPYGSIGYRWGETGRWNLENKEGQHNGDVDLTLSLKGSGETASVGLDYFGGDEHPYFTAAAGDAIQYKNIPCHTISLANGQTAKVATVFDLMVANLGVDNGHGGQNVTDDYNDANIAGTPAWQEKITGVSREKVIQIAREFAENAHKTQGKSMVIIGAGMNHWYHLDMNYRGVINMLMLCGCIGKSGGGWAHYVGQEKLRPQSGWAPVAFGLDWHRPPRHMNGTSFFYNHSSQWRHETVSAHELLSSHANKSQFPEHMLDYNIKAERAGWLPSAPQLNQNPLTIAPQAKAKGMSVQDYVVESLHNGSLRFAAEQPDNPQNFPRNMFIWRSNLLGSSGKGHEYMLKYLLGTKNGLLGDETVQTGFKPNEIDFVENAPTGKIDLVTTLDFRMSSTCLYSDIVLPTATWYEKEDINTSDMHPFIHPFTAATDPAWEAKTDWEIYKYIAKAFSRLCVGHLGTQTDVVTLPMQHDSADELAQPFGGTDWKSAGEKPIPGINCPLIKVVERDYPSTYAKFTSLGPLMDKLGNNSKGIDWDTKEEVQQLGQLNYRIHDDSVANTRPNMSSVVNAIETVLMLAPETNGHVAVKAWAELSKKTGRDHTHLAKASEHEKIRFNDIVAQPRKIISSPTWSGLESDKVSYNAGYTNVHELIPWRTITGRQQFYVEHPWIQAFGEQMQQYRPPIDTKTTQAFKKYQSNGNKEIVLNFLTPHQKWGIHSTYSENLLMLTLSRGGPIVWISEIDAQKAGIEDNDWIEVFNANGAITARAVVSQRVKEGMTMMYHAQEKLVNIPGSENSGTRGGIHNSVTRTILKPTHMIGGYAQFSYGFNYYGTVGCNRDEFVVVRKMANIDWLEGRADDELPRPLPTTLD

SEQ ID NO: 381 - protein, 961 aa, Moraxella catarrhalis
MMITGNTMNQIFHLMTQTKHTNHTKKVLKLSMLSLCLLHITQTAMAEDTLKDVPKATDFSVILDEVVVTATNGTKKSQKPFTKASATSVRENVFNASENIDAIVRSVPGAFTQQDKSSGLVSLNVRGDSGFGRANSMVDGVTQTFYSTSTDAGRGGGTSQFGAVIDQNFIAGVELNKGSFNGKGGINTLTGSANFRTLNADDVIKDDKNFGFIAKGLTGKNATDKNFMLAAGGRGWLDNGSISALYAYSHKDISQNYKVGGGGTHIGNVGDDLLLSKQKQVFAKEHALTYNEASRSWQKDLTKLDKETGKPLWDRKYQFGGKCYGLGCIDTKEKFDEYVADKQQQWQKHGAKEYSITPIDITALNQTSKSHLAKIRYNNDTSDVGLQLRKMDTTIGSRRISNDNYQLDAAYNPNEIIDLKVLAAHNVGVQKYPKGSTFTGWKLDKDFETKNTANLFDLNNTHTFNLPKQMDLTTTVGLNILHNEYSKNRFPDELGLFYTNDLLCGGGYDACGGRFQGTSSTLPKKSVIVQPSGKQRFHSIYLDTSLQKDKYQLDYSVNASQYRFSGEHASYYSSQKEFQDKFGEDSQIYKQHCSPSCDVYEPLVTTSGKKHAINHSVTLSAKYDTGFMPFVSFARTHRMPNIQEMFFSQIGDVGVNTALKPEQANTYQLGFNVFKRNLLTDNDTLGLKVVGYQSRINNYIHNVYGKWYDTKNPPSWVTSGALKGDTIQHRNWQMPVHKQGLELEINYDAGRYFTNLSYARQKTDQPTNYSDASESPLNSSKEDQLTQGYGLSKVSMLPKDYGRFELGVRAFDNKLTMGSAVRYYGQSPRATIEPRYIDGTHGGNTSHSDDKGAHVIKQIEMLKRQPLVHDFYVAYEPIKDLVMRLDVQNAFDKLYIDPLDANNDAATQRYYHSYYNDADEGAPCAAGQLCKPDAKYGGTTRSVLTNFAKGRSLLFSMTYKW

SEQ ID NO: 382 - protein, 249 aa, Moraxella catarrhalis
MAGHSKWANIKHRKAKQDAAKGKIFTKIIREIVSAAKSGDPDPANNPRLRAVLEKANAANMTKDVIKRAIERGAGGGDNDNMEEITYEGYGIGGVAVIVETMTDNVNRTVGEVRHAFSKNGGNLGTSGSVAYLFSKRGEIIFHDLSLEDSIMEIALEAGAEDIENDGESLLVITSPADFGTVVDALIAAGLTPNSMEVTMSPSTTADIDNIDDAQKVLKMIDMLEDLDDVQEVYTNVNFSEAVMASLDA

SEQ ID NO: 383 - protein, 166 aa, Moraxella catarrhalis
MTIPRSILFVCLGNICRSPSAEAVMRAKLTNFLPDVYLDSAGTAGYHIGNPPDPRAIATGESLGFELSRLRARQVSLEDFYEFELIFAMDDTNLSDLQTLKTTAMMHANGRDMAKLSLFDPEGRSVADPYYGDEQDFEQMYTHLQQIADRYITVWQLDHQDSLAAD

SEQ ID NO: 384 - protein, 1033 aa, Moraxella catarrhalis
MAVIHIDGKTYDVDGSDNLLSACLSLGIDVPYFCYHPVLGSVGSCRQCAVKQYNNAEDYQAGKGRLVMSCMVAPSDDMYISVDDDEAKAFRKSIVEYLMTNHPHDCPTCEEGGHCHLQDMTYMSGHHRRRYRFTKRTHHNQELGPFIAHEMNRCIACYRCVRFYQDYAGGDDLGVYASNNRVYFGRPEDGQFDSEFSGNLTEVCPTGVFTDKTHSERYNRKWDMQYAPSICHGCSAGCNISAGERYGELRRIENRYNHDVNGYFLCDRGRFGYGYVNRADRPTHPLKKVNGQFVKTSADLAVDGVADLLKGKNVIGIGSARASLESNFALKRLVGANNFSTGERAAVKDVVDLGVALLRHEAVHQASLAQIETADGVFILGEDITQTASRVALSVRQAAKNKARQMASTLKTEHWLAEPVKRIGQSAYSPIYVACVADTKLSDIAKVSAVATPDDIAKLGFMVGDVIKAYADTLDEIGKSENAIFAKEKQTDLVIDDEMAMQFLAHHIAYDLIMANRPLVVTGTSLTSKVIVQAAGYIAQTLTAKRAKIAHVEREFIEVQNAKIRDEVARQFIDPDKDAKTDGTHTTERDPNDFEKELSSRLLKINTLYADKTGVYVAMPEANSVGVNLLGGQAMEEVLAQAFEAAVVLEHDLSNLTPNQFDKLTQKTLIVLDHQSYEWHDKADFVLSSASFAESDGTLVSAEGRAGRFFASYDKKYYEPTSELKDSWRWLHALDNAMTNKMGEPIWRHLDDVIDELVVEYPHLAQIKDAAPESDYRITGLKVAREPRRYSGRTVLRSPISIHEPMQPKDLDSGLTFSMEGYVGDKTNPSLIPFAWSAGWNSPQAWNKYQNKVGGRLKGGDVGIRLFETLPKTQMVFGRVDIDHVNVATSIFYGRAVIVPVHNLFTSSRMISRSPVVASQIKPAMWMINHDDAERWMVKVGDKLTLSQHGAEITLPVEVVDYLADGCIGYPDGAVPLMVGIPTTVKKADKDTPVYVPDHQKSMQRLASIKRENIFTPKAGFNNAPFAMNKVGA

SEQ ID NO: 385 - protein, 472 aa, Moraxella catarrhalis
MNKPNVSEQIDARKNGLAPSQLNRQKTPIWGVGLTDGQAPTSLTHPLTWRLYHHDALLTLADYEALDGFVGLKNALTKSPKEVGEMIKTANVRGRGGAGFNAGLKWTFMTPPDGGVRYLICNADEMEPGTFKDRLLMERLPFQLIEGMLISAYAIGASVGYVFIRGEYVLAAKRLQNAINECVANHLLGDGILGTEFNFTLHVHTGAGRYICGEETALINCLEGRRANPRTKPPFPQVSGAWGRPTVVNNVETLNNMPAILLNGVDWYLDLPKAKGKSTTPGTKIMGVSGRVKDAGLWELPFGHTARELIELAGGMQEGLSLKAWLPGGASTDFLTASDEHLDLVMDFDPIMKAGSRLGTCLMMVVDESQDMVSLSKNLQQFFQRESCGWCTPCRDGLPWGVKILDAMDNGQAQADDIDKLSELTRDLWLGKTFCAHAPGAMEPLMSALKYFRHEFEQKVNNSKPQQNKVGV

SEQ ID NO: 386 - protein, 708 aa, Moraxella catarrhalis
MKHIPLTTLCVAISAVLLTACGGSGGSNPPAPTPIPNAGGAGNAGSGTGGAGSTDNAANAGSTGGASSGTGSASTPEPKYQDVPTDKNEKAEVSDIQKPAMGYGMALSKINLYEQKDISLDANNIITLDGKKQVAEGKKSPLPFSLDVENKLLDGYMAKMDKADKNAIGDRIKKDNKDKSLSEAELAEKIKEDVRKSPDFQKVLSSIKAKTFHSNDGTTKATTRDLKYVDYGYYLVNDANYLTVKTDKLWNSGPVGGVFYNGSTTAKELPTQDAVKYKGHWDFMTDVANKRNRFSEVKENPQAGRYYGASSKDEYNRLLTKEDSAPDGHSGEYGHSSEFTVNFKEKKLTGELSSNLQDSRKGNVTKTKRYDIDANIDGNRFRGSATASNKNDTSKHPFTSDAKNSLEGGFYGPNAEELAGKFLTNDKKLFGVFGAKRDKVEKTEAILDAYALGTFNTKGATTFTPFTKKQLDNFGNAKKLVLGSTVINLVSTDATKNEFTKEFTKNKPKSATNEAGETLMVNDKVSVKTYGKNFEYLKFGELSVGGSHSVFLQGERTATTGEKAVPTEGTAKYLGNWVGYITGADTGASTGKSFNEAQDIADFDIDFKNKTVKGKLTTKGRTDPVFNITGDITGNGWKGKASTAKADAGGYNIDSNGTNKSIVIENAEVTGGFYGPNANEMGGSFTHNTNDSKASVVFGTKRQEEVKQ

SEQ ID NO: 387 - protein, 512 aa, Moraxella catarrhalis
MLAFLIGAVMTITPVYTTFTPTKTPIKFFMAGLTFLIAHISHADDGRTDNQEPINQEIATLEPIINHAQPELLSHGALTPKTEPILAQTPNPAEDTLIADEALLLDNPDLLNHALNSAVMTNHMAGVHALLPIYQKLPKDHQNGILLGYANALAALDKGNAKKAIDELRRIIAIMPEYNVVRFHLARALFMDKQNEAALDQFNKLHADNLPEEVRQVVGQYRQALKQRDSWTWQLGMNLAKEDNINQTPKNTTQGQWTFDKPIDAITLSYQLGADKKWSLPKGAYVGANAQIYGKHHQNHKKYNDHWGRLGANLGFADAKKDLSIETYGEKRFYGHERYTDTIGIRMSADYRINPKFQSLNAIDISRLTNHRTPRADSNNTLYSTSLIYYPNATRYYLLGADFYDEKVPQDPSDSYQRRGIRTAWGQEWAGGLSSRTQISINKRHYQGANLTSGGQIRHDKQMQASLSLWHRDIHKWGITPRLTISTNINKSNDIKANYHKNQMFVEFSRIF

SEQ ID NO: 388 - protein, 105 aa, Moraxella catarrhalis
MKNLTNKLLAGVLSAAVLLPAVGISTTAVANDRIKAQAYGDSNFAQNRQKAIQMLAARGYQVGDIEVDDFLGKPVFEVEAYKNGAEYDIVLEYPSLKIIKEQRDY

SEQ ID NO: 389 - protein, 1093 aa, Moraxella catarrhalis
MIGWGVSVYQSAKANRWSLMNQSKQNNKSKKSKQVLKLSALSLGLLNITQVALANTTADKAEATDKTNLVVVLDETVVTAKKNARKANEVTGLGKVVKTAETINKEQVLNIRDLTRYDPGIAVVEQGRGASSGYSIRGMDKNRVAVLVDGINQAQHYALQGPVAGKNYAAGGAINEIEYENVRSVEISKGANSSEYGSGALSGSVAFVTKTADDIIKDGKDWGVQTKTAYASKNNAWVNSVAAAGKAGSFSGLIIYTDRRGQEYKAHDDAYQGSQSFDRAVATTDPNNPKFLIANECANGNYEACAAGGQTKLQAKPTNVRDKVNVKDYTGPNRLIPNPLTQDSKSLLLRPGYQLNDKHYVGGVYEITKQNYAMQDKTVPAYLTVHDIEKSRLSNHGQANGYYQGNNLGERIRDAIGANSGYGINYAHGVFYDEKHQKDRLGLEYVYDSKGENKWFDDVRVSYDKQDITLRSQLTNTHCSTYPHIDKNCTPDVNKPFSVKEVDNNAYKEQHNLIKAVFNKKMALGNTHHHINLQVGYDKFNSSLSREDYRLATHQSYQKLDYTPPSNPLPDKFKPILGSNNKPICLDAYGYGHDHPQACNAKNSTYQNFAIKKGIEQYNQKTNTDKIDYQAIIDQYDKKNPNSTLKPFEKIKQSLGQEKYDEIDRLGFNAYKDLRNEWAGWTNDNSQQNANKGTDNIYQPNQATVVKDDKCKYSETNSYADCSTTRHISGDNYFIALKDNMTINKYVDLGLGARYDRIKHKSDVPLVDNSASNQLSWNFGVVVKPTNWLDIAYRSSQGFRMPSFSEMYGERFGVTIGKGTQHGCKGLYYICQQTVHQTKLKPEKSFNQEIGATLHNHLGSLEVSYFKNRYTDLIVGKSEEIRTLTQGDNAGKQRGKGDLGFHNGQDADLTGINILGRLDLNAVNSRLPYGLYSTLAYNKVDVKGKTLNPTLAGTNILFDAIQPSRYVVGLGYDAPSQKWGANAIFTHSDAKNPSELLADKNLGNGNIQTKQATKAKSTPWQTLDLSGYVNIKDNFTLRAGVYNVFNTYYTTWEALRQTAEGAVNQHTGLSQDKHYGRYAAPGRNYQLALEMKF

SEQ ID NO: 390 - protein, 558 aa, Moraxella catarrhalis
MTKPRLRSHIFAISFGIFASLTMLSACGKPSKIHTPSITHQNMLPSNTLAQLSALPQLTQGLGDTGKSVIDPNKPTLVKFWASWCPLCLATLQETHDWRDDPNLAGFNIITVASPTHLNEKNTQDFTDWYQVLQADYPNLPVLIDSSGQLIKELGVQVYPSWAILDKNGQLVYLNKGNLSFEQVSYLAKNPQELDQLKTQGGQTAMPTKNKDGVYYNDQGQPLNTKTIHLAGGCFWGVEAYFERIDGVVDAVSGYANGNETIANPSYEQVIAGSGHAETVKVVYDADKVDLDTLLQYYFRIVDPTSVNKQGHDRGIQYRTGVYYTDPSDKAIIENALNELQQKYKAPIVVENLPLRHFSPAEEYHQDYLTKNPNGYCHVDLSLANDKITSKAPTLPKASTVQEALDPRRYQAFTKDNLKQSLTKAQYDITQNAGTERAFSHAYDHLFDDGLYVDIVSGEPLFLSTDKYNSGCGWPSFTKPIDPQVISEHTDTSYNMIRTEVRSRIANSHLGHVFPDGPKARGGLRYCINGDALKFIPKADMEKQGYGALLPLIKPAQP

SEQ ID NO: 391 - protein, 303 aa, Moraxella catarrhalis
MQTSKTHVNALTLATFGMLSGSAFAQNSISVYIAPQGSAHATVASAYTSSSSKNAVEPGFLTKLQTDTINSQKFTKLSNESQTVGRLYHYNEPTTNFSANFVANSYASYSGDYSERSTYDHLIRESAARHGVDPALIKAVIHTESSFNPNVRSRMGAMGLMQLMPGTARDMGVYNAWDPAQNIEGGTKYLAYLQHQFSNPNHVIAAYNAGPGNVKKYGGIPPFRETKNYVIKVNDRYNNIYRMDAALYQGYDANRTMLAMNSTPVAQVKTTTTSYAQPITQRAPSNPVINRDASAHIYFSNNE

SEQ ID NO: 392 - protein, 74 aa, Moraxella catarrhalis
MPSSMRLAMPISPSRVSKSTVPISRIYIRTGSVVRPGSVSTEASTAAASSVAMSSSLPVSDNKISSSSGATSKT

SEQ ID NO: 393 - protein, 796 aa, Moraxella catarrhalis
MSKSVPRSFWRHQSGLIVTGILLIVLFVMMVAFVLYAMHLNTAVVGKFENRKWDIPATLYSRPLVLHQGAALSAKDLESWLKLLRYSHDDTSQTGRYQKNGQVYTIYTRGFHYGDADKDPKQLIEVHFDRNTIKSLKSSAPNNSGILRLEPIKIGSIYPDNLEDRLLITQEQIPKPLVDALIATEDRNFYQHHGISMRGVARALFTNLTGGQVQQGGSTITQQLIKNFYLDSERTLKRKINEALMAVLLETHYSKDEILLAYMNEINLGQNGKQSVNGFGIAAQFYFDKPLGELSLEQYALLVGLAKGPSHYNPRKNPERALQRRNTVLNSMLATGKIDTATHQDAINRPLGVVKTPAIARLQFPDFFDAVQRELKTHYRSEDLKNRGLRIISTLDPLAQQAADTAMTNQLGKLRKKGGRTQKLQGALVSAHPATGELVALVGSGSDFTGFNRAIDAKRQVGSLLKPVIYLTAFQSGQYNLTTPVNDTQTSYTVNGRSWTPKNYGGQSHGSVPLLTALAKSYNQAAVNVGMQLGLDAFKAQLGNLSITTDIPPYPSAMLGAIDLSPMQMLGMYQIFANGGAYTPIHTIRTVIDDNGRVLQRSQPRHQFRAPPQAVYLLNRGLQEVIKSGTAKAADSINNHLGLAGKTGTTNDNRDAWFAGYSGNYVSVVWVGRDDNQPIGLTGGSGALPIWMDYMKRLNLTAVNLPLPTGVTWQWMDGRLGLPTMESCPDARWLPVIDLYRPSQMSPCASAILYQEQIYRQMLEYGSQGIADTGDVYIEDAPIYDEPAEDGDNPWW

SEQ ID NO: 394 - protein, 940 aa, Moraxella catarrhalis
MPKYKLLSASIAFSLLMSHQAYAHDEAFDKLSTKIAGQSQSWYQHLDAQVVTPFPKKGTLEAEVDRKISWDMQNNTTAERLALAEEDKNQSFAHVSHEFRKSALKEFAPHITDEQFVNIFKNLEYLSANAIYSDDFNVGRMRAYDFILKDKYLRGRPYQVMDREGKYIEGYENLKTYIDSQGRERKNSSYPSGHTSNGFGQAVVMAMAFPERGQEVFSRALQYGESRVIVGAHFPTDTMTSRLARYYYMAQLLNDDEIAQGLVRYIKQARQPFEESCQNAPLKSCLEMLPQDLHEQYKASDYHIGYYGTLKSDEKASRLEPEEMPGTAEALLRLRFNYLDGDARRQVLASTAYPKNSHAHMGDLDNKNHTWGLINLPKAYDGISHIYQDIETTTQDKHLDFAGFSLEDTWKNDISGTGRLILNHPGELTLSGNNTFAGATVKQGHLKFTGNNALADDSYINQGTMSVTGQFQSKVVLNHDAKMMIVGQSDQPTTVQEIELSAKDSWIYVAPKGVFQVNANSQENNTTTDSQISIQTLSGVGHVMVEDHSNLHIDKLSGETIFAINPSDAPVKINELKGRHGVGIPSHISKDKNHQSLLKVDNNQGSFYLIDTNNNVVDAAEQGAYAYQLVMRPNNTLQLSQFANDNSPIASSMTKTALNTGMGSLYTLSSQMNHLGSMNNRQSVWLNHRYQENNIKSHNTQFDLKLNQTTLGAGSQVGQTYLGAYINKSEGDVDHVFGGKNDLDATGFGVYLNRLLPNQQEIFLQGAWQNVRQKIHAKQANHDNLTASIKDNTWAIALGAQQQMKFHNVDFQPSFEISHIQTNPKSFRYDQMPNLQINPKKASMTTVNIGTKISKNYGLLQPYLKAKMFYQDTKQDLNIIDMNNEVSWWSTDLSGFGFAGALGVTSQINSRFFISGEASAQYQEEVKTPIEAKLSLNYQF

SEQ ID NO: 395 - protein, 2145 aa, Moraxella catarrhalis
MNHIYKVIFNKATGTFMAVAEYAKSHSTGGGSCATGQVGSACTLSFARIAALAVLVIGATLNGSAYAQQAKIEIHPDDKSSNAQATGDASIAIGSLSQAKGSQSIAIGGTKPDKQAGRTQNHVGALAKGRESIAIGGDVLAGGHASIAIGSDDLYLNEPSIANQDAIQNAINNYQELKDIKLSTDPKVQYKYTHAQGHASTAVGTMAQALGHFSNAFGTRALAQNNYSLAVGLLSKARQGYAIAIGSSAEANQYRALALGADTQVDLRNGIAIGYGSQVTDNDATNNNTNAYIPGDGEFQINPIHTATLNAGLFSIGNRSTKRKIINVGAGSEDTDAVNVAQLKLVEKVAKRKITFKGDGNGPGVQTKLGDTLNIKGGQTDADQLTSDNIGVVADSSKNSLTVKLAKNLSNLEKVNTKNLIASEKVKVGNGTGTNIAELQSGGLTFTQPNIGGQNSGKTVYGTDGVKFADNTNTGATTAAVDTTRITRNKIGFAGNADQVDESKPYLDKDKLKVGNVKITKNGIDAGGKEITNVKSAIADAGNGQADSTFITRLRNANANTNKSGSAATIKDLHGLSQVPLTFVGDTGTTDKKLGDTLNIKGGQTDADQLTSDKIGVVADSSKNSLTVKLAKNLSNLEKVNTKNLIASEKVKVVNNGNTAELLDSSLTFTPTGVNADKTVYGVDGLKFTDNNDKALDGTTYITKDKVGFAKAGGTLDESKPYLDKEKLKVGKIEIKDSGINAGGKAITGLSSTLPNTTDDTVPGVHTALHGRKISDDNKTRAASIADVLNAGFNLEGNGEAVDFVSTYDTVNFANGNATTATVTYDVTNKTSKVAYDVNVDGTTIHLTGTNGKKNQIGVKTTTLTTTSAKGNTPINFSVNSGDDNALVNAKDIADNLNTLAGEIRTAKGTASTALQTFSITDEQGNNFTVGNPYSSYDTSKTFETVTFAGENGITISNDKTKGKVKVGIDQTKGLTTPKLTVGNNNGKGIVIDSKDGQNTITGLSNTLANVTNDGAGHALSQGLANDTDKTRAASIGDVLNAGFNLQGNGEAKDFVSTYDTVNFIDGNATTAKVTYDDTKQTSTVTYDVNVDNKTLEVTGDKKLGVKTTTLTKTSANGNATKFSAADGDALVKASDIATHLNTLAGDIQTAKGASQASSSASYVDADGNKVIYDSTDKKYYQVNEKGQVDKTKEVTKDKLVAQAQTPDGTLAQMNVKSVINKEQVNDANKKQGINEDNAFVKGLEKAASDNKTKNAAVTVGDLNAVAQTPLTFAGDTGTTAKKLGETLTIKGGQTDTNKLTDNNIGVVAGTDGFTVKLAKDLTNLNSVNAGGTRIDEKGISFVDANGQAKANTPVLSANGLNMGGKRISNIGAAVDDNDAVNFKQFNEVAKTVNNLNNQSNSGASLPFVVTDANGKPINGTDGKPQKAIKGADGKYYHANANGVPVDKDGNPITDADKLANLAVHGKPLDAGHQVVASLGGNSDAITLTNIKSTLPQIATPSTGNANAGQAQSLPSLSAAQQSNAASVKDVLNVGFNLQTNHNQVDFVKAYDTVNFVNGTGADITSVRSADGTMSNITVNTALAATDDDGNVLIKAKDGKFYKADDLMPNGSLKAGKSASDAKTPTGLSLVNPNAGKGSTGDAVALNNLSKAVFKSKDGTTTTTVSSDGISIQGKDNSSITLSKDGLNVGGKVISNVGKGTKDTDAANVQQLNEVRNLLGLGNAGNDNADGNQVNIADIKKDPNSGSSSNRTVIKAGTVLGGKGNNDTEKLATGGVQVGVDKDGNANGDLSNVWVKTQKDGSKKALLATYNAAGQTNYLTNNPAEAIDRINEQGIRFFHVNDGNQEPVVQGRNGIDSSASGKHSVAIGFQAKADGEAAVAIGRQTQAGNQSIAIGDNAQATGDQSIAIGTGNVVAGKHSGAIGDPSTVKADNSYSVGNNNQFTDATQTDVFGVGNNITVTESNSVALGSNSAISAGTHAGTQAKKSDGTAGTTTTAGATGTVKGFAGQTAVGAVSVGASGAERRIQNVAAGEVSATSTDAVNGSQLYKATQSIANATNELDHRIHQNENKANAGISSAMAMASMPQAYIPGRSMVTGGIATHNGQGAVAVGLSKLSDNGQWVFKINGSADTQGHVGAAVGAGFHF

SEQ ID NO: 396 - protein, 619 aa, Moraxella catarrhalis
MSLLQISEPNQSKNPHQHRYALGIDLGTTHSLVAVVRSGRSEVLAFGQSPLLPSVVYYGKKSSRPIVGNDALNYADDHKNTIISAKRFMGRAKSDIKFSHPYDLSGNHQTMPAFLTAQGEKSPVETSAHILRHLKNHAAAALPPDSIQGAVITVPAYFDDAQRAATKDAATAAGLNVLRLLNEPTAAAIAYGIDKNTAQGNYLVYDLGGGTFDVSLLRLSEGVFEVLATGGNSALGGDDIDRLIAHWLIQSSHLTPADIDETEKSRLAKLAKTYKQALSSQDSVVIEVEIGGILVTQTLNNDMLSEIIQPVIRRTIQSCEQVMRDAKIDKSNLNDIILVGGSTRMPVIQNAVTAYFERTPLCNINPDEVVAIGAGIAADQLINQSNETLLLLDVTPLSLGIETMGGLVEVIIPRNTPIPVTRRQVFTTHQDGQTGMIIQVVQGERDTVANCRGLARFELHGIPPMKAGLARIEVTYAIDANGQLTVSARETTTDIISQIQVSPSYGLSEEQQEQLLQAGFIHAAEDKAARMLIETKVEAQRELLALQSALDEFTDLLSDEEQTNLRHHMQVTANSLNTDDKAAIDEAIKALKVHSDHFASVIMDKNVKDALTGTRTSDW

SEQ ID NO: 397 - protein, 893 aa, Moraxella catarrhalis
MKTMQSNEVRQAFIDFFVSKQHTHVPSSSLIPHNDPTLLFTNAGMNQFKDTFLGLEKRDYVRAVSSQKCVRAGGKHNDLDNVGYTARHHTFFEMLGNFSFGDYFKKDAIAFAWEFLTDEKWLALPKDRLYVTVYHTDDEAFDIWHKDIGLPQERIIAIGDNKGGAYQSDNFWMMGDTGPCGPCTEIFYDHGEHIWGGLPGTPDEDGDRYIEIWNCVFMQFNRQKDGTMQPLPKPSVDTGMGLERISAIMQGVHGNYETDIFTKLMTKAVNIIGLPTDTDIQNEPSLKVLADHIRSVAFLIADGVIPSNEGRGYVLRRIIRRAVRHGNKLGATDAFFYQLVHPLADIMGDAYPQLRHEQHKIEQAILKEEEQFAKTLSQGLKLLSQELDSLQQGDALAGETVFKLYDTYGFPADLTADIVREKGITIDEAGFELSMAEQRTRAREAGKFAMDYHALIQVDSATEFLGYERLDNDSTVIHLYQDGKAVDTLAEGDEGVLILDKTPFYAESGGQVGELGEISTESGVFDVLDTQKSGQAIIHHGVVKMGHINNNQSATAQVASQVRASSAKNHSATHLLHAALRTILGDGVSQKGSMVSGDLLRFDFSYDKPLTEQNINQIETMVNQQILANTPAHVEILDIDSAKNKGAMMLFGEKYGDTVRVLSMGTTDKDGKPFSIELCGGLHVTRTGDIGLFKIISEQGISAGVRRIEAVTGMGAVHYVQQGDKQLNQLANQFKAKRHEIAQRVAQLSDKNRHLEKQIERLNQKFASLHANSLMDNLKNIHGQKVLIATVNGMDNKALRTLSDDMKSKLADGIVILASVYTADGEDKITMTASVGKHLTSKIKAGDIIKHLSENLGGKGGGKPDFAQGGATDVANLPKLMTGLTDWIGEKLG

SEQ ID NO: 398 - protein, 353 aa, Moraxella catarrhalis
MATFRKILNPISLKNLELKNRIVMPPMCQYSATDGVPNDWHLLHYTSRAVGGVGLIIVEMTNVAANGRITANCLGLWNDEQEQAFKKLVDSVHAQGAKIGIQIAHAGRKAQDEPNAVAPSAIHYGELDYAGQNLITPRQLSIDEIKALVQAFADSVKRAVNAGFDAIELHAAHGYLIHQFCAPKSNQRSDEYGQDRLLFGEQVIHAVRAVMPDEMPLIVRISAQEYGENGFDSDYGVEIAKRFSTAGADVFHVSGGGDGVLCEGKHPQFYAGYQVPLARKVKHATGKPVIAVGMLDDPAVADHVLGMGDADLVAIGRGLLRDPYWVLNAQYQQNRSDGKEVQFVPRQYERGFM

SEQ ID NO: 399 - protein, 359 aa, Moraxella catarrhalis
MVKVMQKMHAHTQAIQRWVMAILLPILLIFGETAWASESVSEDDLTALIISANRASQSNPNSPLAESVREFEQAINPANQADTKPQSTPINIPTSHAQSISHDKLILNTPVVDVAKILTPSEYLHLTEQLHKIYQDNLAQAALVIVPSTDGIDIFDYALAVAERWQLGQADTDDGLLITVAVNDRKIYILTGYGLEGVLPDAALSRIIRDDITPAFKSGNYAQGLSAGIARIDERLRADPESLARADAQTDDSVDIDIIGLFIIALIAGSFLGAILGRFLGATFGAGGFVIVALMSGAGFFVVMIAAVILWVFLLARGVLPITGGSGNFGSGGRSGGFGSGGFGGGGGSFGGGGAGGSW

SEQ ID NO: 400 - protein, 813 aa, Moraxella catarrhalis
MRNSYFKGFQVSAMTMAVMMVMSTHAQAADFMANDIAITGLQRVTIESLQSVLPFRLGQVVSEAQLADGVKALYATGNFSDVQVYHQEGRIIYQVTERPLIAEINFEGNRLIPKEGLQEGLKNAGLAVGQPLKQATVQMIETELTNQYISQGYYNTEITVKQTMLDGNRVKLDMTFAEGKPARVVDINIIGNQHFSDADLIDVLAIKDNKINPLSKADRYTQEKLVTSLENLRAKYLNAGFVRFEIKDAKLNINEDKNRIFVEISLHEGEQYRFGQTQFLGNLTYTQAELEALLKFKAEEGFSQAMLEQTTNNISTKFGDDGYYYAQIRPVTRINDESRTVDVEYYIDPVHPVYVRRINFTGNFKTQDEVLRREMRQLEGALASNQKIQLSRARLMRTGFFKHVTVDTRPVPNSPDQVDVNFVVEEQPSGSSTIAAGYSQSGGVTFQFDVSQNNFMGTGKHVNASFSRSETREVYSLGMTNPYFTVNGVSQSLSGYYRKTKYDNKNISNYVLDSYGGSLSYGYPIDENQRISFGLNADNTKLHGGRFMGISNVKQLMADGGKIQVDNNGIPDFKHDYTTYNAILGWNYSSLDRPVFPTQGMSHSVDLTVGFGDKTHQKVVYQGNIYRPFIKKSVLRGYAKLGYGNNLPFYENFYAGGYGSVRGYDQSSLGPRSQAYLTARRGQQTTLGEVVGGNALATFGSELILPLPFKGDWIDQVRPVIFIEGGQVFDTTGMDKQTIDLTQFKDPQATAEQNAKAANRPLLTQDKQLRYSAGVGATWYTPIGPLSISYAKPLNKKQNDQTDTVQFQIGSVF

SEQ ID NO: 401 - protein, 241 aa, Moraxella catarrhalis
MSDKNPQFSRILLKLSGEALAGGRDMGIDANILDQMSLSIAHLRGLGVQVGIVVGGGNLYRGSTLQKQGLVGRVTGDQMGMLATVMNGLAMRDALVRRNIKTRLMSAIAIDTVVESYSSRDAIRHLNNGEVCIFVAGTGNPFFTTDTAACLRGIEIEAGLILKATKVDGVYDKDPTTDDDAVKFDSLSFDEVLEKKLGVMDLTAIALCREHNVPLQVFDMNKPNALLNVVMGEAEGTRVYH

SEQ ID NO: 402 - protein, 672 aa, Moraxella catarrhalis
MKQILLGTLLMPIELNQRHNANAIRILAMDAVQQANSGHPGAPMGMADIAEVLWREFLRHNPKNAKWVNRDRFVLSNGHGSMLLYALLHLTGYDLSIDDLKNFRQLHSKTAGHPEYGYADGIETTTGPLGQGIANAVGFALAEKTLAAQFNKPDNAIIDHFTYAFLGDGCLMEGVSHEACSLAGTLGLGKLIAYYDDNGISIDGEVEGWFSDDTAKRFEAYGWQVLKIDGHDADAIRDATNQAKAESAKPTLIICKTIIGLGSPNKQGKEISHGAPLGLDEIALTRTQMGWADTTPFIITDEMYRAWDATAKGSTDEAAWNKQFAEYQDKYPKEAAELLRRFSGDLPENFDQLADEFIQTCVQKAESIATRKASQNAIAALAPHLPEILGGSADLAGSNLTLWSGAKGVQEYADGNYVHYGVREFGMTAIANGVALHGGFIPYTATFLMFMEYARNAVRMSSLMKQRVINVYTHDSIGLGEDGPTHQPVEQIANLRMTPNHYVWRPCDTVETAVAWKMALKTKTAPSSLILSRQNLAFQSRSDEQIQNIEKGGYILAPEKGTLKAIIIATGSEVELAMQAYEQLEGVRVVSMPCAEIFVKQDSGYIESVLPSDVRVRVAVEAAITDYWYKFVGLDGKVVGMTTFGESAPAKVLFEHFGITTQAVVDAVNSLL

SEQ ID NO: 403 - protein, 975 aa, Moraxella catarrhalis
MSIDNLSTNYNPANIEQKWYKIWEQQGYFKPQPNPAMSDKQNAFSIALPPPNVTGSLHMGHGFNNTIMDTLTRYHRMMGHNTLWQPGTDHAGIATQMVVERQLGLQGISRHDLGREKFIDKIWAWKEQSGNTITRQIRRLGSSVDWSRERFTMDDGLSQAVKEVFVRLYDEGLIYRGKRLVNWDPKLHTALSDLEVESVEEQGSLWHFRYHFADQSLTTQDGKNYLVVATTRPETLLGDSAVAVHPDDERYAHLIGKTIVLPISGREVPIVADDYVEKDFGTGCVKITPAHDFNDHELGKRHELPLINIFDEDACIKAEFDLIAKVGEPISNHITAPADYAGLERFAARKKLIEQAQNENWLEKIEPYTLKAPRGDRSGTVIEPLLTDQWYVAIETLAKPAIEAVQNGDIQFVPQQYTNMYMAWMRDIQDWCISRQLWWGHRIPAWYDDNGNVYVGRDESEVRAKYHLGDIPLRQDDDVLDTWFSSALWTFSTLDWTGQTSFDDYGDALQTFHPTSVLVTGFDIIFFWVARMIMMTMHFIKDKDGKPQVPFKTVYVHGLVRDSQGQKMSKSKGNVLDPIDLIDGIDLENLVNKRTQGLMNPKEADNIAKQTRQEFPDGIPAFGTDALRFTYASLASTGRDINFDLKRIEGYRNFCNKIWNATRFVLMNCIDKDGNPQNIDKSANPKLWQLPEHWIISRLNATINDIHEYMSQYRFDLMSQAIYEFIWNEYCDWYVELAKSSLNASEQDGTVSDERKAQIRYVLLFVLEMAMKMTHPIMPYLTEEIWQTITPLLGKTGKSIMLSTYPKCDDSKINEQAESDMAWLQSLIGAVRNIRGEMKLGNAVRLPVLIQGASDEQKASLVRIDNQFKTLAKVDSLTIVKTGEEVPLSSSGMVGQMKVLVPMKGLIDPTAELNRLNKVRDKLQTQADAINKKLSNDNFIAKAPAQVVEAERAKLSELQGQLAEVEKQVGALGNL

SEQ ID NO: 404 - protein, 615 aa, Moraxella catarrhalis
MKHTTKFSAISLGIFILPFVMSLPSYAANVITDTTQIKPNAVSRQDGFVDTKVDQMINPYGLSDKALQSISQSAAWRRLLLFQDTPVEHDNSSIDNPKFFLAQNGYHDAYAELIATLSAMQRGDGDAVCRFVARTHFLTQALATQDIDSGVDDRQCSDFHAFADTLNAKRLSLIFAEEHPNNIASAFAHVLMRVDDGQDEDEAATAINYTVQPNKADGVLVSTAKSIIGGYPAVMEIMPYQKKADDYLVKDERDLWQFSLNLTPKEVTQIVRHIWEVKEMKRPYFFTHDNCVTEIVRLIDVVRPEGNIQADIGNIAIPSRIAAILSQVGMVTDQKFIPSNSTIRQAKLNNGENFDIAHLAPNRNSPVHAMPVHRFGFGVGQDTRLSDRAVYGIQLNGAYQDLLDNPQGVRSLLDLQAMSAKLITDGSKLKLEDLTIFSTRSLNPANTAKNNATAKKGVGLAMAFHTGLRRTIDASNKANHHHLVLDVDIKTGKSWNFGQVRQNSGELANTTCYTLVGGGTQIGRVNQGYRLRVGTDIGCIHYANENLRGLMQLSLPYYYHFDDAPSDRSGYFQPALSVGIQADIAPYHAVRLTAQREKLNSDYATQAMLSVQRYF

SEQ ID NO: 405 - protein, 60 aa, Moraxella catarrhalis
MASRTLNNCAKLDSANAEHIPIKAISHIQNTAPAPPIPIAIATPATLPTPTRLANPVTNA

SEQ ID NO: 406 - protein, 1095 aa, Moraxella catarrhalis
MTDQITDYKNTLNLADTTFAMRGDLAKREPLWLEQWEKDDVYGQIRQARQGRKTYILHDGPPYANGQIHLGHVVNKVLKDIIIKYKTLDGYDAPYVPGWDCHGLPIEQKVEQKIGKVGQKVNATKFREACREYAKSQVQLQMADFKRLGVLGDWDNPYLTMNYQQEANIVRALGKIYDNGHIVRGMKPVNWCLDCGSALAEAEVEYQDKSSDAIYVGFDIVNRENLPIIANISGTLQAVIWTTTPWTLPANQAISVHGDFDYAVIKGKKTPIFALPSQIDSKNFTLRTLTKADKQALQACASDPAIWQFMPTKRHLPEVFEPFFEQAVKDKAYAIIDKRTGNIIGTTRFCHDNAKDDTIGIGFTFITPEFWGKGVNDEIKHTLLNHAFKYRNAVCFQIHEGNDRSKKAVEKLGAVYQKDVENDFGKMWVYTITNPSTINHTTHFIVANDLVADFSKNVALDDVETITTIKGADLTVLNAQHPLISERQVPIITGEHVTADSGTGLVHTAPAHGVDDYIVGNKYNLPVENPVSDAGVYLDNAKVFVGEHIYKAQPKIIETLGSSGHLLDHKKIRHSYPHCWRHKTPIIFRATPQWFISMEQNGLRQKALNDIKNITWTPAWGQNRIEAMIDGRPDWCISRQRTWGVPITFFIHKETDQLHPRTSELIEKAAQIIEKGGIEAWFDADISDFLGDESGEYYKVTDTLDVWFDSGATNFAVLNHRKELSNPADLYLEGSDQHRGWFQSSLLVSESIYGRPPYKQVLTHGFTVDAKGHKLSKSKGNTKGFEPSDIANKMGVDILRLWVGSSDYRYEMAVSKEGFDRTTDMYRRIRNTIRFLLANTDDFDPKTDMVSTDKLISLDKYILYRTKHIQQEIIQAYHSMDFHQVCQTVMGFCSQDLGGFYLDIIKDRTYTTKADGLPRRSAQTTLYHIAHALLRWIAPILSFTAQEAWQVLKDTQGYIFTAEWYQLPDFQMNDISHEDWDKVALIKDTVNKSIEQARSDKIVSSNLTAKVTITAPQDITDILNKFGDELRFVFITSDATVKSGDTLSTTITPADGTKCVRCWHVRTDVGTHAEHPEICGRCVQNLDDGEMRLYA

SEQ ID NO: 407 - protein, 759 aa, Moraxella catarrhalis
MNKFQLLPLTLAVSAAFTTTAFAAVSQPKVVLAGDTVVSDRQGAKIKTNVVTLREKDESTATDLRGLLQDEPAIGFGGGNGTSQFISIRGMGHNAIDLKIDNAYQDGQLHYHQGRFMLDPQMVKVVSVQKGAGFASAGIGATNGAIVTKTLDADELLRNSDKDYGFKVGAGLSTNKGHSYHGSAFGKAQTGFGQVDALVSYNQVNDSDYKGGKGYTNLLGNDVVTRSALDKSSYLVKAGLTAGDHRFVVSHLNEVHKGIRGVREEFDFANRALTLDIEKDKKKRTDEQLQAELDNKYAGKGYKLGSKTPDGKKYNVVDANGKLVADLDRNNPTQRETYQKLTNLEWTGKNLGFANEVTANVYKLEHGRNSSSDKGNSYILRDVPNTINDNGDSPSNMHVSAKGANINFDKEFNHGLLKGFGVDHTLLKYGINYRHQEAVPPRGIRPGFQHQEKTDAGIYLEAVNQINDFTINTGVRVDRFDFKAMDGKKVGKTDINPSFGVIYDVNPNLSVSGNLIYATRSPRFADAILSRGFRDGVVSIADNAKAEKARNTEIGFNYNNGPYTAFGSYFWQRVDNARATADAVQHPTVTTAKITYLGNQGHQTNHGYELGVGYTEGAWRARAGVAHSKPTMHNVKFKANPEYAVRTGRTWTADVAYRLPNPSVELGVRHTLVEGVDAKDTSILSGKFDDKDGAILNREGYNVSDIYANWKPYGNDKVNVNFAVNNVFNKNYRPHTQRASIDTLPGAGRDFRVGVNFTY

SEQ ID NO: 408 - protein, 267 aa, Moraxella catarrhalis
MRQIFMHRLLPPTLMASFLLLSACSSGNSHAKDTSNASQPTTQTSSQSDTTLVKTLQDNLTQAGVDITVTNALPTTMPDIYWVSFENAPAMFTDKSGEYLIQGQIVKLSGDYPTDITADIQSSLAKETLAKANTDDMIIYPATSQHKASIYVFSDPTCHYCRMLHKDIKQLNAGGIEVRYLAWPRSEQDIPLTEAIWCSQDRKAALTAAKLGQTVHAKHCKNPVQEHLALGRSLGVSGTPAVFAESGRQIGGYMPAKDLIHTAIEQR

SEQ ID NO: 409 - protein, 507 aa, Moraxella catarrhalis
MKISTTARILTLSALAIGMAACSSIPKKIDTSAPILAVPNVPMKDGYQVYDADTISVAQAPSVASLRWQEFYTNPKLAALIELALQNNKDLQSAVLAVQSARAQYQITEAGSVPQVGSNTSVTRQANNRIDANASTNYHVGLAMSGYELDLWGKVASQKQQALHQYLATNAAKDAVQISIISSVAQGYVNLAHALAQRQLAEQTLKTREHAMMITQKRFEAGIDSKSPSLQAASSLESARLAVYAADTSILKAKNALQLLIGRPVPNELLPAIDASMHMGHITTQTLFSAGLPSELLYYRPDIMQAEHRLKAAGANINVARAAYFPSIRLSSNVGFSSNSLNNLFESSALGWSFGPAISLPIFDAGSRRANHEMAQVAQQSALVDYEKAIQNAFKEVSDVLAERATLGLRLDAQIRLQDNYRQTYDIAYARFRSGLDNYLTVLDAERSLFINQQNILQLELAKLVSQIQLYQALGGGASLTAEQITEFNRQREAMRPAMLMDDEKSQ

SEQ ID NO: 410 - protein, 473 aa, Moraxella catarrhalis
MKLNLTAVLVIGLMTSMGVLTACSQQDDTSVQQQMPNPTVDVQTIMLETVPVIQSFAGRVAAIETSEVRPQVTGIIDEVLFYEGSMVQAGQPLYRINVDSYTSQVQAGEAAVQNAEAAVGNAEATRASAQANLAAQEANLAQARADVMRLEGLLEVKAISRQAFDQAVTAMRTAEANVLAARAAVAQADANIHSATASVQSARANLNASQLDAGRTIVKAPISGVTSISAVTAGALVSANQPTPLVTINRLDEVYVDISQSATQMLRLREQIESGQVGQGGADVQLVLEDGQTYPILGQLLLANAQVDTATGNMTLRAVFPNPDGKLIPGMFVNARLIQSVVHEAALLPQSAIMRTPKGETQVYIVNADNKIEIRTVTTAGTYHGNWIVTGGINSGDRVVIIGGSKVKPDQEVNVRELPAASSEANADISTPPPSKPSTVNSNIPMARPQSDTTVANLSAEEQAAMNAADETK

SEQ ID NO: 411 - protein, 498 aa, Moraxella catarrhalis
MKFIHDYLKHDERLYRHTLPTPLDNPKLVSLNTQLIDQLGLSSLDATAWADIISGRLSPLTQIAPHKIQPIAMAYAGHQFGQWAGQLGDGRGVLIAQLHNKKTGKLIDLHLKGAGLTSYSRRGDGRAMLASCIREYLGGHALNGLMIASSDAIGLVVSDTHIQRRHIEKAAALLRVSDCHVRLGHFEWVAMYAADYFETFVIKIIQSYYLHLYDTHQNTANISQLLHEIAANTARMIAKWQLIGFCHGVMNTDNLNITGTTLDFGPFAFMEGFNPTWINNHSDHTGRYVYQNQPTIGHWNLAVVYHHFKRLVNQDDIDDALMTYQEVFENTYHHGLCQKLGIKPSHQAIQLGYRLLMLMQNERLDYTNTFRALIAVADHGENRTQFTHEYTLLANLTNILSATSYDIWQNWVNDYLDCLKQQSTKQTAIKTLQQTNPIYILRNHMAERAIVSAHQGDFDEVARLFALLDNPYQQQTIATVDDTRMAFANETVAVSCLS

SEQ ID NO: 412 - protein, 89 aa, Moraxella catarrhalis
MGLSNLLGLTQSVAPSSCALANLSSLISTTIMRPAPAMRAPITAASPIPPKPKIATVSPGFTLAVFRTAPMPVVTPQPSKQTSSKGASF

SEQ ID NO: 413 - protein, 786 aa, Moraxella catarrhalis
MSKNTFSASFIAILSKVILGVLALFAILILAFPIGFYGMVMYLEPTLPDVKNLDNSRFEMPLQIYTADNKLIGQYGNRYSLPVTFDEIPERMIQAFLAAEDDTFFEHSGISVKGMGRALTEVISDNDAQTGGSTITMQVAKNYFLSPERTINRKLTELFIARKIENELTKNEILTLYVNKIYLGEGTYGIQAAARRYYSKNLESLTIAQMAMIAGLPKAPSAYNPVVNPERAMERRNWIIGRMHQEGFITASEKDAAIAEPMGLNIYQEKLDLNMPYVAEMVRSTLVDRYGEAVMDSGWRVQTTINSSSQLAANAALVGGLRDYDRRHGWRGVEAESGSLEGRKNFDHIYPAKVTKVHNQSFEAKLQSGETVTIGWSGMNWARRYYDANRVGGGYSNAHQMVKVGNIVRISPINEAKTAWRMESIPKVQGALVSLDPENGALRAVVGGFHFNHSKFNRAIQGYRQPGSIIKPFIFAAALESGQYTPDSLISDAAIRVGRWQPKNADGRYTGDMTLRRALTLSRNTPAIRLLRSAGVDESRHLMNAMGGLEIERMPSTLALALGAADATPLQMATGFATIINGGHRIQPYFIERIYNFDNETIYQANPQQACALCFNENLSATNAKLLELFEANKSEISTDTPSAPAGDRLQPRSAPQYVAATQAPRVLSHQTAYDISNMMREVITSGTGRRARALGRSDVGGKTGTTNLAKDAWFAGFHPTNVAVVWVGFDTPSTLGNSEYGGVAALPIWVNFMSHELRNTPSQWISQEDRSKAVKATQQVIDLKD

SEQ ID NO: 414 - protein, 182 aa, Moraxella catarrhalis
MSNTQHAPSPAPITSPTGTPKVGIIMGSQSDWATMSLSAQILADFGIPFECQVVSAHRTPDKLFDYAKTAKDKGLKVIIAGAGGAAHLPGMCASQTPLPVLGVPVKSSTLSGWDSLLSIVQMPKGVAVGTLAIGDAGAFNAGLLAIQILAIDDDALATKLDEFRQKQTQTVLTSPHPGIVNH

SEQ ID NO: 415 - protein, 152 aa, Moraxella catarrhalis
MKILIDADALPVIAKELIIKTANRTQTMAVFVANRMTKLPPSPFLSYVVVGTGFDVADEYILQTAQPNDLVITSDIPLANDVLEKGAKVLTPRGEEFHKDNIKPRLNARDFMESLRGTGVLDPKSMGGQKPYSNKDKIAFAGGLNRLAHALP

SEQ ID NO: 416 - protein, 400 aa, Moraxella catarrhalis
MHTQFVLNQAKKETVMKNLLPQDWQQPHISEADTADKWLIPPIVDLCAHLREPGHQSHGTLASEGRAARQNGILHIVLPPDTDPVLENGSLLKGLREKAWADGGIHLHVLGALTQGLEGKQPANLAGLKQGNAIAVTNAGAGFENDLVLLRCLEYAATFGLKVFFYPDEPSLSKGGVAHEGYIASFHGLQGIPWLAETIALSKQILMTEETGIHAHFSQITCRTSVELIRHAKQKGLPITCDVAMHQLHLTDDDIEGYNAHAYVLPPLRSNTDQKALIKGLQDGTIDAICSHHEPLSSSAKQAPFAQCQAGISNFDTFVSLGVKLVADGVLSAEQLVEKICLNPAKIAGITDYERIGGAVLIDPNQAWTVTKDTMLSAGKNTPFLGQTLMGRAEKVFFDG

SEQ ID NO: 417 - protein, 302 aa, Moraxella catarrhalis
MLTKFTALVMGVLLSVSAMAADMATADMATLTRQAQSGGAVAQSDLADEYYQQGNHAKAFEWYTKAANQGEAEAQHNLGVMYYEGQGVRQDYYKSVEWYTKAAKQGYADAQFNLALMYAQGDGVRQDYHKAFEWFTKAANQGLAEAQFSLGVMYDEGQGVRQDYYKAVEWYTKAANQGYAGAQFNLALMYYEGQGVRQDDQEAVEWYTKAAGQGHAEAQYNLGVMYYEGQGVRQDYHKAVEWFTKAANQGFAQAQNNLGVMYDEGQGVRQNIATAKIYYGQACDHGLQKGCDNYRLLHQQGH

SEQ ID NO: 418 - protein, 877 aa, Moraxella catarrhalis
MSQMLTEYRAHVAEREALGVPPQPLTDVQTADLIELLKNPPQGEEEYLIDLLENRVPAGVDQAAYVKAAFLNAIVKGETSSPLINKERAVYLLGTMLGGYNVAPLVELLDDDELGEMAAKALKKTLLVFDAFHDIEEKAKAGNANAKAVLESWAEGEWFTSRPKVPEEMTITVFKVTGETNTDDLSPAQDAWSRPDIPLHANAMLKNEREGIHPEKNGEVGPLTQIQELLDRGHPVAYVGDVVGTGSSRKSATNSVLWFFGEEIPHIPNKKDGGVCLGGKIAPIFFNTMEDAGALPVEIDVTEMNMGDEITLKIDHANATVAAFKDGTQIAKSKLKTPVLLDEVRAGGRINLIIGRNLTSKARESLGLEPSTLFRTPEQPADTGKGFTLAQKMVGRACGLPEGQGIRPDTYCEPKMTTVGSQDTTGPMTRDELKDLACLGFSSDLVMQSFCHTAAYPKPIDVVTHHTLPDFIMNRGGVSLRPGDGVIHSWLNRMLLPDTVGTGGDSHTRFPIGISFPAGSGLVAFAAATGVMPLDMPESVLVKFKGKMQPGITLRDLVHAIPYYAIQAGDLTVEKKGKKNIFSGRILEIDLTEMENDLTVEQAFELSDASAERSAAGCAITVSEEKVAEYLRSNIVMLKWMIAEGYGDARTLARRAENMQKWLDNPSLLKADADAEYAKVYEIDLADIKEPILCCPNDPDDAKLLSEVAGDKIDEVFIGSCMTNIGHFRAAGKLLQEVPAGSLTTRLWIAPPTKMDERQLMDEGYYNTYAQAGARTEMPGCSLCMGNQARIAPNCTAVSTSTRNFPNRLGQGANVYLASAELASVASVLGRLPTVEEYMGYAGKLESMEAEVYNYLNFDQMGEYTGRADRIDVAQLN

SEQ ID NO: 419 - protein, 121 aa, Moraxella catarrhalis
MQHQFYQLCQYIHPFGQSLGSYKLPPPWILVYLHTPYTLQQLAVCPVQMPQRQVQQMPDRHLPLDLSDLGNYGWMLKRRYSWVRCVLGCPCTVNSRAFRFLLLPGHKCCNNPHPSVGVHPF

SEQ ID NO: 420 - protein, 168 aa, Moraxella catarrhalis
MPCPSGRPQARPTIFWAKVKPLPVSAGCSGVRNRVDGSRPKDSRALLVKLRPMIRLMRPPARTSSSSTGVFSLDLAICVPSLKAATVAFAWSIFRVISSPMFISVTSISTGNAPASSMVLKKMGAILPPKHTPPSFLFGMWGISSPKNHNTELVADLRLEPVPTTSPT

SEQ ID NO: 421 - protein, 616 aa, Moraxella catarrhalis
MTTTHPQAESPTQKRQRLKQHANALPNRPGIYKMLGKSGEILYVGKAKSLKNRVGSYFAKTIEHPKTQALVQRIEQIEIIITRGETEALLLEQNLIKNHRPPYNVLLRDDKSYLYIYISTDKFPRLSIGRGKGRYTQGRFFGPYPSARNAKESVQLMQRLFMIRSCTNSFFAQRQRPCLEYQIKRCKAPCVGMVSAEQYQSDVRAALAFLQGHSHEVQAILVKKMEEAAAALNFEQAAFYRDRLAMISDLQAKQAVFRLQGEADVFAIAADAGAVAVCVLTVRGGQVLGVKNYFPDDIEPAIKSNQERLKEFLLSFYFQVSDDLPDEIISSVAIEEASILADILQVQFGKRTTIKHKVTTHRDDWLSIANLNANNALSAKLKDSRELQARFEQLKQVLAPITTCTIDRIECFDISHTMGEAAIGSCVVFDQNGPKKRDYRQYAIHDITAGDDYAAMRQVLMRRYTKHPLPDLLLIDGGKGQLNVAIEVLSELGKLTDTLLVGVAKGEGRKAGLEVLHFVTHEPIDLPADSKALHLIMQIRDEAHRFAITAHRKKRDKKRSSSVLEVIPGLGQVRRRDLLNHFGGIQQLLGASQDEIAQVKGIGPMLAGTIYKALHE

SEQ ID NO: 422 - protein, 111 aa, Moraxella catarrhalis
MPVCPAGDHASNFLLMASTARGRPPPTALDMTTTSGTISACSKANILPERANPACTSSRISTMSWRAVTSRTFCSHFLGAGTTPPSPWMASKMTAAGLTTPLSTSSMKFSK

SEQ ID NO: 423 - protein, 301 aa, Moraxella catarrhalis
MSKTPQSAIIPDHCRAGIFMEGDFITNNTATIADACRQALHTLNELQAKFTGESLGLTIGFGAQAWQRFGYTKEGGQIKPFRPLGNGLAPATQHDVMFHIQSMRHDINFSLAKELVAIFKDIVQIQSETHGFRWVENRGLEGFVDGTENPQDDAVSGVAAIADGDDAGGSYVLLQKYRHDLNKWDKLPVCDQENSIGRSKVDNIEFDKAKRLSDSHLGRTNLKEDGKTLEVVRRSLPFGTVTGEHGLMYIAYAARLWNIEAQLLSMFGETDGKIDLLLKHVSTAVSGAYYYAPSVERLENL

SEQ ID NO: 424 - protein, 66 aa, Moraxella catarrhalis
MMIIRRQPARQFEQFIINDSVIINQLFDRSKLMRCDKTVGCVNQSNDNTNQPPSPKINQHSGTDFG

SEQ ID NO: 425 - protein, 816 aa, Moraxella catarrhalis
MAKKNQATGDYSTVSGGQSNIAKGNYSTVSGGQSNIAKGNYSTVSGGDDNEANGESSTIGGGFFNEANGESSTVSGGDYNAANGNSSTIGGGFLNEANGNSSTIAGGRNNQAIGDNSTVAGGRDNQATARNSTVAGGYNNKATGIDSTIAGGRGNQATGAGSFAAGVGNQANTDNAVALGNKNTINGDNSVAIGSNNTVEKGQTNVFILGSGTSRAKSNSVLLGNGTTGKEATTVEHATVNGLTLTGFAGASKTGNGTVSVGSENNERQIVNVGAGEISAKSTDAVNGSQLHALATVVSQNQSDITELKDGIGKDLLDLSGRLLDQKASIYKTDHRSVENRVYIRKNESDITELKDGIGKDLLDLSGRLLDQKADIAQNQTDIQDLADYNELQDQYAKKQTDAIDALNKASSENTQNIEDLAAYNELQDAYAKQQTEAIDALNKASSENTQNIEDLAAYNELQDQYAKKQTDAIDALNKASSENTQNIEDLAAYNELQDQYAKKQTDAIDALNKASSENTQNIEDLAAYNELQDAYAKQQTEAIDALNKASSENTQNIEDLAAYNELQDAYAKQQTEAIDALNKASSENTQNIAKNQADIANNINNIYELAQQQDQHSSDIKTLAKASAANTDRIAKNKADADASFETLTKNQNTLIEKDKEHDKLITANKTAIDANKASADTKFAATADAITKNGNAITKNAKSITDLGTKVDGIDGRVTALDTKVNAFDGRITALDSKVENGMAAQAALSGLFQPYSVGKFNATAALGGYGSKSAVAIGAGYRVNPNLAFKAGAAINTSGNKKGSYNIGVNYEF

SEQ ID NO: 426 - protein, 741 aa, Moraxella catarrhalis
MNKSTIIYTHTDEAPALATHSLLPIIRAFGATAGVDFVTSDISLAGRILAAFPEYLTQEQQTPDALAQLAELVTQPKANIIKLPNISASMPQLLAAIKELQAKGYQLPDYPTNPQTDQEKDIQKRYDKIKGSAVNPVLREGNSDRRAPKAVKNFAKKYPHSMGQWSKDSQSHVATMNGGDFFANEQSKTVADATTVSFIFTDTQGNQSQLRKPLALKAGEIIDATMMSKKALLSFLKEQVQDAKQKDVLFSLHMKATMMKVSDPIIFGHAVRVFFAPVFEQYGDKLAEAGINVNNGFGHLLANLDKLDADTRKGVTDAIAQAYATNPDIAMVDSDKGITNLHVPSDVIVDASMPAMIRNSGRMWDKNGNAKDTKAVIPDSSYAHVYQAVIDFCREHGAFDPTTMGSVPNVGLMAQKAEEYGSHDKTFEIEHDGTVELIDDHGTVLSSHTVEAGDIWRACQTKDAAVKDWVSLAVNRARLSGTPAIFWLDKNRAHDAELIKKVHHYLGDLDTDGLDIQILPPADACLASLERMKQGLDTISVTGNVLRDYNTDLFPILELGTSAKMLSIVPLMNGGGMFETGAGGSAPKHVQQFNEENHLRWDSLGEFLALAVSFEHLAQTTNNAKAQVLAETLDRATEKLLLNDKSPKRKVGELDNRGSHFYLAMYWSQALAAQNSDTAMADKFAPIAKALSDNEDTIVAELNQVQGQSVDIGGYYAPDFAKTAAAMRPSQTLEQILAQLH

SEQ ID NO: 427 - protein, 358 aa, Moraxella catarrhalis
MPIFIHALKMRWQLFYNFCQTNHVISQNKSKAKNSSITNLVLANITMTQIILSSNQIHRLHHAFFVPQGEIKATLLIVHGMSEHGGRYADFARFLADNGVLVATYDQLGHGQTVKDKYELGFFDEKHPVQTLCKDVIIMADKLKDKARTLTSRPVPHYIMGHSMGSFIVRTVLTHHSTRFDGVILMGTADSFGLLNRMSLVSFGLLNQLFAKQVNQKAAHLMNHVLLSQLRSPISASPFAWLSENIDAVRAFETDPLTGFAFTNNGWMTLFALMQRAMRPDWYTNMPSNYPILLISGNNDPVGNMGQDIQTLQEKLIHANCSVSVQLYPNMRHEPLHEKQAQKVFVDILAWIERHLRV

SEQ ID NO: 428 - protein, 128 aa, Moraxella catarrhalis
MTHLILLNRQCKAMASLADISSTQSSTMTALPSAFNAATRARLGKMVLILSTVKNSSIQSSCTLGLMPRRRSAITSILFSPSVWLSAGNWRLILLSTKTSISTKTICPMAVRAKPSATHEPTPPTPMT

SEQ ID NO: 429 - DNA, 22 bp, Artificial Sequence
  Synthetic oligonucleotide primer
ctaataccaaaatacccgtttg

SEQ ID NO: 430 - DNA, 20 bp, Artificial Sequence
  Synthetic oligonucleotide primer
caggctcaatcacctcaaag

SEQ ID NO: 431 - DNA, 21 bp, Artificial Sequence
  Synthetic oligonucleotide primer
caatcatgaaaacatcaatgg

SEQ ID NO: 432 - DNA, 19 bp, Artificial Sequence
  Synthetic oligonucleotide primer
gtgaaatgggtttttgtgc

SEQ ID NO: 433 - DNA, 22 bp, Artificial Sequence
  Synthetic oligonucleotide primer
ggactttttgataagaatttgc

SEQ ID NO: 434 - DNA, 18 bp, Artificial Sequence
  Synthetic oligonucleotide primer
gatatcaccgcctgcttc

SEQ ID NO: 435 - DNA, 24 bp, Artificial Sequence
  Synthetic oligonucleotide primer
gataattatgacaaaagctggttg

SEQ ID NO: 436 - DNA, 22 bp, Artificial Sequence
  Synthetic oligonucleotide primer
gatgtcattgatttgctcatcc

SEQ ID NO: 437 - DNA, 20 bp, Artificial Sequence
  Synthetic oligonucleotide primer
cagccatgatacccaaaaag

SEQ ID NO: 438 - DNA, 20 bp, Artificial Sequence
  Synthetic oligonucleotide primer
cttatttgtgatcggctttg

SEQ ID NO: 439 - DNA, 19 bp, Artificial Sequence
  Synthetic oligonucleotide primer
catgcgtactttccatgtc

SEQ ID NO: 440 - DNA, 20 bp, Artificial Sequence
  Synthetic oligonucleotide primer
atctgacgaacgatgacttc

SEQ ID NO: 441 - DNA, 20 bp, Artificial Sequence
  Synthetic oligonucleotide primer
ctcaggtatgaccaagctcg

SEQ ID NO: 442 - DNA, 22 bp, Artificial Sequence
  Synthetic oligonucleotide primer
gacgaacactaaccatctcttc

SEQ ID NO: 443 - DNA, 21 bp, Artificial Sequence
  Synthetic oligonucleotide primer
cattgtcaaactgtcagaagg

SEQ ID NO: 444 - DNA, 21 bp, Artificial Sequence
  Synthetic oligonucleotide primer
gtttagaccttcatcacgctc

SEQ ID NO: 445 - DNA, 20 bp, Artificial Sequence
  Synthetic oligonucleotide primer
gcttgctggattagcatacc

SEQ ID NO: 446 - DNA, 20 bp, Artificial Sequence
  Synthetic oligonucleotide primer
cagatcagccaagttttacg

SEQ ID NO: 447 - DNA, 19 bp, Artificial Sequence
  Synthetic oligonucleotide primer
cttcagcccatcaaagacg

SEQ ID NO: 448 - DNA, 18 bp, Artificial Sequence
  Synthetic oligonucleotide primer
gccttttgaccgaagatg

SEQ ID NO: 449 - DNA, 22 bp, Artificial Sequence
  Synthetic oligonucleotide primer
acttagggcaagtttactttgg

SEQ ID NO: 450 - DNA, 22 bp, Artificial Sequence
  Synthetic oligonucleotide primer
atgtattaaacacccgctacac

SEQ ID NO: 451 - DNA, 20 bp, Artificial Sequence
  Synthetic oligonucleotide primer
gaagaaaaagacgcctgtgg

SEQ ID NO: 452 - DNA, 25 bp, Artificial Sequence
  Synthetic oligonucleotide primer
gggtgtttaatacattgttgatacc

SEQ ID NO: 453 - DNA, 22 bp, Artificial Sequence
  Synthetic oligonucleotide primer
ccacaaaaacggtgtattttag

SEQ ID NO: 454 - DNA, 22 bp, Artificial Sequence
  Synthetic oligonucleotide primer
gacgatatcacctctctcatcg

SEQ ID NO: 455 - DNA, 20 bp, Artificial Sequence
  Synthetic oligonucleotide primer
gacccaatgtggtaatcgtc

SEQ ID NO: 456 - DNA, 22 bp, Artificial Sequence
  Synthetic oligonucleotide primer
gccaaatttattgaacctaagc

SEQ ID NO: 457 - DNA, 20 bp, Artificial Sequence
  Synthetic oligonucleotide primer
ggcgtctttggtagacagtg

SEQ ID NO: 458 - DNA, 21 bp, Artificial Sequence
  Synthetic oligonucleotide primer
cgtgtattatcaccgatgatg

SEQ ID NO: 459 - DNA, 19 bp, Artificial Sequence
  Synthetic oligonucleotide primer
gtatttggcaagcagttcg

SEQ ID NO: 460 - DNA, 22 bp, Artificial Sequence
  Synthetic oligonucleotide primer
cataatccaagccattttatcc

SEQ ID NO: 461 - DNA, 20 bp, Artificial Sequence
  Synthetic oligonucleotide primer
gcttgttcttggtaatcacg

SEQ ID NO: 462 - DNA, 21 bp, Artificial Sequence
  Synthetic oligonucleotide primer
gctttgacaatgagattttgg

SEQ ID NO: 463 - DNA, 24 bp, Artificial Sequence
  Synthetic oligonucleotide primer
ccaagatttttctatttaaccaag

SEQ ID NO: 464 - DNA, 20 bp, Artificial Sequence
  Synthetic oligonucleotide primer
gttgatagattggcataccg

SEQ ID NO: 465 - DNA, 20 bp, Artificial Sequence
  Synthetic oligonucleotide primer
cgctcatatacaatttgctg

SEQ ID NO: 466 - DNA, 20 bp, Artificial Sequence
  Synthetic oligonucleotide primer
caaaactgtcctcaatctgc

SEQ ID NO: 467 - DNA, 19 bp, Artificial Sequence
  Synthetic oligonucleotide primer
gatattggcgttggagcag

SEQ ID NO: 468 - DNA, 19 bp, Artificial Sequence
  Synthetic oligonucleotide primer
ccacctcatgcagtgcttc

SEQ ID NO: 469 - DNA, 20 bp, Artificial Sequence
  Synthetic oligonucleotide primer
ctttcaacataacggcgttg

SEQ ID NO: 470 - DNA, 21 bp, Artificial Sequence
  Synthetic oligonucleotide primer
cacaaataacgatgcgttcag

SEQ ID NO: 471 - DNA, 20 bp, Artificial Sequence
  Synthetic oligonucleotide primer
cttacctgccatttgtgatg

SEQ ID NO: 472 - DNA, 19 bp, Artificial Sequence
  Synthetic oligonucleotide primer
gcatcggttaaaagaccac

SEQ ID NO: 473 - DNA, 21 bp, Artificial Sequence
  Synthetic oligonucleotide primer
gcttggtgttgaggttgttac

SEQ ID NO: 474 - DNA, 22 bp, Artificial Sequence
  Synthetic oligonucleotide primer
catcaagtcgatcgtatcattc

SEQ ID NO: 475 - DNA, 20 bp, Artificial Sequence
  Synthetic oligonucleotide primer
ccattgataagatcccaagg

SEQ ID NO: 476 - DNA, 21 bp, Artificial Sequence
  Synthetic oligonucleotide primer
gacgattgtcatcgatactgc

SEQ ID NO: 477 - DNA, 24 bp, Artificial Sequence
  Synthetic oligonucleotide primer
catatgaagttttatgttgaggtg

SEQ ID NO: 478 - DNA, 20 bp, Artificial Sequence
  Synthetic oligonucleotide primer
ggcagatatgcttgatgagc

SEQ ID NO: 479 - DNA, 21 bp, Artificial Sequence
  Synthetic oligonucleotide primer
gtggtatggtacatccacaag

SEQ ID NO: 480 - DNA, 20 bp, Artificial Sequence
  Synthetic oligonucleotide primer
ggtcaaccgatcaaaatgtg

SEQ ID NO: 481 - DNA, 22 bp, Artificial Sequence
  Synthetic oligonucleotide primer
caaaaacttgaaagcacaaaag

SEQ ID NO: 482 - DNA, 19 bp, Artificial Sequence
  Synthetic oligonucleotide primer
gcaggcactcaaaagtagg

SEQ ID NO: 483 - DNA, 22 bp, Artificial Sequence
  Synthetic oligonucleotide primer
cttaagacatgagcctaactgg

SEQ ID NO: 484 - DNA, 23 bp, Artificial Sequence
  Synthetic oligonucleotide primer
cttaatgggtcttgttttggtac

SEQ ID NO: 485 - DNA, 21 bp, Artificial Sequence
  Synthetic oligonucleotide primer
ctgaaattgcattgactcgtg

SEQ ID NO: 486 - DNA, 20 bp, Artificial Sequence
  Synthetic oligonucleotide primer
gataaacaccacccaaaacc

SEQ ID NO: 487 - DNA, 22 bp, Artificial Sequence
  Synthetic oligonucleotide primer
ggacgctataggctgtctaatc

SEQ ID NO: 488 - DNA, 22 bp, Artificial Sequence
  Synthetic oligonucleotide primer
ggctaagattgaagattgattg

SEQ ID NO: 489 - DNA, 21 bp, Artificial Sequence
  Synthetic oligonucleotide primer
cgactatgtcgtctcaactgc

SEQ ID NO: 490 - DNA, 22 bp, Artificial Sequence
  Synthetic oligonucleotide primer
gtaaaacaaggcgagtatttgg

SEQ ID NO: 491 - DNA, 18 bp, Artificial Sequence
  Synthetic oligonucleotide primer
caacagggcaggtatcgg

SEQ ID NO: 492 - DNA, 23 bp, Artificial Sequence
  Synthetic oligonucleotide primer
ccaacatattgatcttgggtaac

SEQ ID NO: 493 - DNA, 19 bp, Artificial Sequence
  Synthetic oligonucleotide primer
gattttttattgcctcgct

SEQ ID NO: 494 - DNA, 20 bp, Artificial Sequence
  Synthetic oligonucleotide primer
gctaatacttgcctcacctg

SEQ ID NO: 495 - DNA, 22 bp, Artificial Sequence
  Synthetic oligonucleotide primer
ggttagtcgctacggtacacag

SEQ ID NO: 496 - DNA, 21 bp, Artificial Sequence
  Synthetic oligonucleotide primer
gcacctgattttttctgatgg

SEQ ID NO: 497 - DNA, 19 bp, Artificial Sequence
  Synthetic oligonucleotide primer
gcacgctcatcaaaccaac

SEQ ID NO: 498 - DNA, 21 bp, Artificial Sequence
  Synthetic oligonucleotide primer
cacgcaatatggttactggtg

SEQ ID NO: 499 - DNA, 19 bp, Artificial Sequence
  Synthetic oligonucleotide primer
gcattgtgcgataagtacg

SEQ ID NO: 500 - DNA, 18 bp, Artificial Sequence
  Synthetic oligonucleotide primer
gtcaaaatgcgcatcttg

SEQ ID NO: 501 - DNA, 22 bp, Artificial Sequence
  Synthetic oligonucleotide primer
cggtttataaatacagcccatc

SEQ ID NO: 502 - DNA, 23 bp, Artificial Sequence
  Synthetic oligonucleotide primer
ctttctgagcgttattatcatgg

SEQ ID NO: 503 - DNA, 21 bp, Artificial Sequence
  Synthetic oligonucleotide primer
cttaggcgtctgaatgaaacc

SEQ ID NO: 504 - DNA, 19 bp, Artificial Sequence
  Synthetic oligonucleotide primer
gcttgaccaacattaccgc

SEQ ID NO: 505 - DNA, 20 bp, Artificial Sequence
  Synthetic oligonucleotide primer
gtacaacaacctcaggcgag

SEQ ID NO: 506 - DNA, 20 bp, Artificial Sequence
  Synthetic oligonucleotide primer
gcccttctttggtcaaatac

SEQ ID NO: 507 - DNA, 23 bp, Artificial Sequence
  Synthetic oligonucleotide primer
cccttgttatctttatccaaatg

SEQ ID NO: 508 - DNA, 21 bp, Artificial Sequence
  Synthetic oligonucleotide primer
caaggtgtgatgggttaaatg

SEQ ID NO: 509 - DNA, 20 bp, Artificial Sequence
  Synthetic oligonucleotide primer
catggacatgacgcacttag

SEQ ID NO: 510 - DNA, 20 bp, Artificial Sequence
  Synthetic oligonucleotide primer
cgctttaggcgaagtaaaac

SEQ ID NO: 511 - DNA, 21 bp, Artificial Sequence
  Synthetic oligonucleotide primer
caaacgtaaataatccgcttc

SEQ ID NO: 512 - DNA, 20 bp, Artificial Sequence
  Synthetic oligonucleotide primer
caaatcggcaaatcataagc

SEQ ID NO: 513 - DNA, 21 bp, Artificial Sequence
  Synthetic oligonucleotide primer
ccgttatcagaattggtcaag

SEQ ID NO: 514 - DNA, 19 bp, Artificial Sequence
  Synthetic oligonucleotide primer
cgatgtcagcatcttcgtg

SEQ ID NO: 515 - DNA, 21 bp, Artificial Sequence
  Synthetic oligonucleotide primer
ccgagggtaaatatcatcaag

SEQ ID NO: 516 - DNA, 19 bp, Artificial Sequence
  Synthetic oligonucleotide primer
gttgatgcccccatttatc

SEQ ID NO: 517 - DNA, 20 bp, Artificial Sequence
  Synthetic oligonucleotide primer
gtattgggcttgaatcaccc

SEQ ID NO: 518 - DNA, 20 bp, Artificial Sequence
  Synthetic oligonucleotide primer
ggatactcgctatggtggac

SEQ ID NO: 519 - DNA, 19 bp, Artificial Sequence
  Synthetic oligonucleotide primer
ccattgactacaccgaagg

SEQ ID NO: 520 - DNA, 21 bp, Artificial Sequence
  Synthetic oligonucleotide primer
caaaatcagcataaggcgttc

SEQ ID NO: 521 - DNA, 20 bp, Artificial Sequence
  Synthetic oligonucleotide primer
cagctcatatttaggcaagc

SEQ ID NO: 522 - DNA, 19 bp, Artificial Sequence
  Synthetic oligonucleotide primer
gattgggccattttgatac

SEQ ID NO: 523 - DNA, 20 bp, Artificial Sequence
  Synthetic oligonucleotide primer
cacgcatcatgaatgaaatc

SEQ ID NO: 524 - DNA, 20 bp, Artificial Sequence
  Synthetic oligonucleotide primer
ctctttcatccagcacaaac

SEQ ID NO: 525 - DNA, 21 bp, Artificial Sequence
  Synthetic oligonucleotide primer
cggtaatggattggtattatc

SEQ ID NO: 526 - DNA, 20 bp, Artificial Sequence
  Synthetic oligonucleotide primer
gcaacttttacaccatcagc

SEQ ID NO: 527 - DNA, 26 bp, Artificial Sequence
  Synthetic oligonucleotide primer
gcttgatagttaccaaagtcttattg

SEQ ID NO: 528 - DNA, 20 bp, Artificial Sequence
  Synthetic oligonucleotide primer
cgcatcacaaaacatcttgc

SEQ ID NO: 529 - DNA, 22 bp, Artificial Sequence
  Synthetic oligonucleotide primer
gttaaaaaggcactcaaagcac

SEQ ID NO: 530 - DNA, 20 bp, Artificial Sequence
  Synthetic oligonucleotide primer
gatgtgcaaggctcaataag

SEQ ID NO: 531 - DNA, 20 bp, Artificial Sequence
  Synthetic oligonucleotide primer
gttgatggggtagaatttgc

SEQ ID NO: 532 - DNA, 19 bp, Artificial Sequence
  Synthetic oligonucleotide primer
gccataaaatggcaagtgg

SEQ ID NO: 533 - DNA, 20 bp, Artificial Sequence
  Synthetic oligonucleotide primer
gctaagcggtaatcaaaagc

SEQ ID NO: 534 - DNA, 20 bp, Artificial Sequence
  Synthetic oligonucleotide primer
ctctttttggtttgttttgg

SEQ ID NO: 535 - DNA, 21 bp, Artificial Sequence
  Synthetic oligonucleotide primer
gtatcgcagcagacaaaagtg

SEQ ID NO: 536 - DNA, 19 bp, Artificial Sequence
  Synthetic oligonucleotide primer
gtttgaaggcttgtacggc

SEQ ID NO: 537 - DNA, 22 bp, Artificial Sequence
  Synthetic oligonucleotide primer
gtcgtttgttttggtaacactg

SEQ ID NO: 538 - DNA, 22 bp, Artificial Sequence
  Synthetic oligonucleotide primer
caaaatttgtaacagcagatgg

SEQ ID NO: 539 - DNA, 22 bp, Artificial Sequence
  Synthetic oligonucleotide primer
ccacccttgtactgttaaatcc

SEQ ID NO: 540 - DNA, 21 bp, Artificial Sequence
  Synthetic oligonucleotide primer
ctggtcagctgtgtggatacc

SEQ ID NO: 541 - DNA, 23 bp, Artificial Sequence
  Synthetic oligonucleotide primer
gataaacttcccacaactctttg

SEQ ID NO: 542 - DNA, 22 bp, Artificial Sequence
  Synthetic oligonucleotide primer
gttttggttgtgatgatttttg

SEQ ID NO: 543 - DNA, 20 bp, Artificial Sequence
  Synthetic oligonucleotide primer
gcttgcggtgattagttttc

SEQ ID NO: 544 - DNA, 21 bp, Artificial Sequence
  Synthetic oligonucleotide primer
gatcaaatatcgccaagcatc

SEQ ID NO: 545 - DNA, 20 bp, Artificial Sequence
  Synthetic oligonucleotide primer
cgcttaacaattgactcacg

SEQ ID NO: 546 - DNA, 21 bp, Artificial Sequence
  Synthetic oligonucleotide primer
caaaattggtcaaattgacac

SEQ ID NO: 547 - DNA, 19 bp, Artificial Sequence
  Synthetic oligonucleotide primer
ggttaatgcgacggttgtc

SEQ ID NO: 548 - DNA, 22 bp, Artificial Sequence
  Synthetic oligonucleotide primer
cgtttacctgcattatcagcac

SEQ ID NO: 549 - DNA, 25 bp, Artificial Sequence
  Synthetic oligonucleotide primer
caaagtaacccaatgtaactttaag

SEQ ID NO: 550 - DNA, 21 bp, Artificial Sequence
  Synthetic oligonucleotide primer
cagcagtatctgttttcacgc

SEQ ID NO: 551 - DNA, 22 bp, Artificial Sequence
  Synthetic oligonucleotide primer
gatagcttgcttgagtttgatg

SEQ ID NO: 552 - DNA, 22 bp, Artificial Sequence
  Synthetic oligonucleotide primer
cgcattgctaaagcttacctac

SEQ ID NO: 553 - DNA, 26 bp, Artificial Sequence
  Synthetic oligonucleotide primer
ccctaacttatttttattttcatcac

SEQ ID NO: 554 - DNA, 19 bp, Artificial Sequence
  Synthetic oligonucleotide primer
gtggcagtgccagttcttg

SEQ ID NO: 555 - DNA, 19 bp, Artificial Sequence
  Synthetic oligonucleotide primer
ctaagccagcatttgatcg

SEQ ID NO: 556 - DNA, 21 bp, Artificial Sequence
  Synthetic oligonucleotide primer
gacagagctgatgatgactgc

SEQ ID NO: 557 - DNA, 24 bp, Artificial Sequence
  Synthetic oligonucleotide primer
ggttctataaacgatgatgatttg

SEQ ID NO: 558 - DNA, 20 bp, Artificial Sequence
  Synthetic oligonucleotide primer
gcatatggctttcattttgc

SEQ ID NO: 559 - DNA, 22 bp, Artificial Sequence
  Synthetic oligonucleotide primer
caaaagccttgtcatcaaattg

SEQ ID NO: 560 - DNA, 18 bp, Artificial Sequence
  Synthetic oligonucleotide primer
caagtcgcttttggcgac

SEQ ID NO: 561 - DNA, 22 bp, Artificial Sequence
  Synthetic oligonucleotide primer
gatcacttttgcggtattattg

SEQ ID NO: 562 - DNA, 21 bp, Artificial Sequence
  Synthetic oligonucleotide primer
gaataaggcttttgggtaagg

SEQ ID NO: 563 - DNA, 21 bp, Artificial Sequence
  Synthetic oligonucleotide primer
gcccaaaaagaaatcattaag

SEQ ID NO: 564 - DNA, 22 bp, Artificial Sequence
  Synthetic oligonucleotide primer
gctctaccaactgagctattcc

SEQ ID NO: 565 - DNA, 19 bp, Artificial Sequence
  Synthetic oligonucleotide primer
ccatatctttacgggcatc

SEQ ID NO: 566 - DNA, 19 bp, Artificial Sequence
  Synthetic oligonucleotide primer
cacatgcttggacaaaagc

SEQ ID NO: 567 - DNA, 19 bp, Artificial Sequence
  Synthetic oligonucleotide primer
ctgctcaagctggtgtgac

SEQ ID NO: 568 - DNA, 21 bp, Artificial Sequence
  Synthetic oligonucleotide primer
gtcgttgttttgctaccagtg

SEQ ID NO: 569 - DNA, 20 bp, Artificial Sequence
  Synthetic oligonucleotide primer
gccagcctaaaaactaatgg

SEQ ID NO: 570 - DNA, 20 bp, Artificial Sequence
  Synthetic oligonucleotide primer
cagttgattgctgtggtttg

SEQ ID NO: 571 - DNA, 21 bp, Artificial Sequence
  Synthetic oligonucleotide primer
ccattgaagagattggcacac

SEQ ID NO: 572 - DNA, 21 bp, Artificial Sequence
  Synthetic oligonucleotide primer
ctcattgctacaagcagcaag

SEQ ID NO: 573 - DNA, 23 bp, Artificial Sequence
  Synthetic oligonucleotide primer
ggtgtctttttgacataactgtc

SEQ ID NO: 574 - DNA, 19 bp, Artificial Sequence
  Synthetic oligonucleotide primer
cattaaatggtgggtaggc

SEQ ID NO: 575 - DNA, 19 bp, Artificial Sequence
  Synthetic oligonucleotide primer
gatacgcacaggttcaacg

SEQ ID NO: 576 - DNA, 19 bp, Artificial Sequence
  Synthetic oligonucleotide primer
caccaatgcagcttgctac

SEQ ID NO: 577 - DNA, 22 bp, Artificial Sequence
  Synthetic oligonucleotide primer
gcagattattcacaaattgagc

SEQ ID NO: 578 - DNA, 19 bp, Artificial Sequence
  Synthetic oligonucleotide primer
cccatagcaaaggagaacc

SEQ ID NO: 579 - DNA, 27 bp, Artificial Sequence
  Synthetic oligonucleotide primer
gaaatatggcttagataaaattatagc

SEQ ID NO: 580 - DNA, 25 bp, Artificial Sequence
  Synthetic oligonucleotide primer
cttgttatccacaaaactgtatacc

SEQ ID NO: 581 - DNA, 20 bp, Artificial Sequence
  Synthetic oligonucleotide primer
gtatcacaggcttggcttgg

SEQ ID NO: 582 - DNA, 23 bp, Artificial Sequence
  Synthetic oligonucleotide primer
cccatatgagtatcggtgatgag

SEQ ID NO: 583 - DNA, 22 bp, Artificial Sequence
  Synthetic oligonucleotide primer
ggcagatgaggtgattaataac

SEQ ID NO: 584 - DNA, 22 bp, Artificial Sequence
  Synthetic oligonucleotide primer
caaaaaccagcttgtgagatac

SEQ ID NO: 585 - DNA, 19 bp, Artificial Sequence
  Synthetic oligonucleotide primer
cgaatttttgggtgatttg

SEQ ID NO: 586 - DNA, 21 bp, Artificial Sequence
  Synthetic oligonucleotide primer
gaacaagaattggcactcatc

SEQ ID NO: 587 - DNA, 19 bp, Artificial Sequence
  Synthetic oligonucleotide primer
gcgccttgccatgtatatc

SEQ ID NO: 588 - DNA, 20 bp, Artificial Sequence
  Synthetic oligonucleotide primer
ggcatgaatatcatcaaagc

SEQ ID NO: 589 - DNA, 24 bp, Artificial Sequence
  Synthetic oligonucleotide primer
gatatcaattcatcaaaatccacc

SEQ ID NO: 590 - DNA, 20 bp, Artificial Sequence
  Synthetic oligonucleotide primer
ctcaccacgcacaatctcac

SEQ ID NO: 591 - DNA, 20 bp, Artificial Sequence
  Synthetic oligonucleotide primer
gcatttttcagcagtttttg

SEQ ID NO: 592 - DNA, 21 bp, Artificial Sequence
  Synthetic oligonucleotide primer
gggtcaataaagaggtgatgc

SEQ ID NO: 593 - DNA, 20 bp, Artificial Sequence
  Synthetic oligonucleotide primer
gatgattcacaactggatgc

SEQ ID NO: 594 - DNA, 23 bp, Artificial Sequence
  Synthetic oligonucleotide primer
gaaaactgacgctctaatacacc

SEQ ID NO: 595 - DNA, 21 bp, Artificial Sequence
  Synthetic oligonucleotide primer
ggcttgataattgcagaaatc

SEQ ID NO: 596 - DNA, 20 bp, Artificial Sequence
  Synthetic oligonucleotide primer
caagtgcagataaggcattg

SEQ ID NO: 597 - DNA, 21 bp, Artificial Sequence
  Synthetic oligonucleotide primer
gctcactcatctgagctatcg

SEQ ID NO: 598 - DNA, 21 bp, Artificial Sequence
  Synthetic oligonucleotide primer
gcaaaatcttgtaaagccatc

SEQ ID NO: 599 - DNA, 21 bp, Artificial Sequence
  Synthetic oligonucleotide primer
gatgaaattttggcacttgag

SEQ ID NO: 600 - DNA, 22 bp, Artificial Sequence
  Synthetic oligonucleotide primer
gaaaatcagcaggaaatgacac

SEQ ID NO: 601 - DNA, 21 bp, Artificial Sequence
  Synthetic oligonucleotide primer
ccctattttcccctattttgg

SEQ ID NO: 602 - DNA, 22 bp, Artificial Sequence
  Synthetic oligonucleotide primer
gactgatggataattttcgttg

SEQ ID NO: 603 - DNA, 21 bp, Artificial Sequence
  Synthetic oligonucleotide primer
gcgtatggatttttgaaggtg

SEQ ID NO: 604 - DNA, 24 bp, Artificial Sequence
  Synthetic oligonucleotide primer
cagtcattgagtactgccaaatag

SEQ ID NO: 605 - DNA, 23 bp, Artificial Sequence
  Synthetic oligonucleotide primer
catctgttttgtacctgcttgac

SEQ ID NO: 606 - DNA, 23 bp, Artificial Sequence
  Synthetic oligonucleotide primer
ccaaatgatttatcaatcaccac

SEQ ID NO: 607 - DNA, 21 bp, Artificial Sequence
  Synthetic oligonucleotide primer
ctcagctttctgaagatttgc

SEQ ID NO: 608 - DNA, 26 bp, Artificial Sequence
  Synthetic oligonucleotide primer
gatttgatgaaatattattcaagtgc

SEQ ID NO: 609 - DNA, 26 bp, Artificial Sequence
  Synthetic oligonucleotide primer
gatgtctcaaaattcatattatacgc

SEQ ID NO: 610 - DNA, 24 bp, Artificial Sequence
  Synthetic oligonucleotide primer
gattaaacacctgcacatgacaag

SEQ ID NO: 611 - DNA, 21 bp, Artificial Sequence
  Synthetic oligonucleotide primer
gaattctactcccctctcacc

SEQ ID NO: 612 - DNA, 22 bp, Artificial Sequence
  Synthetic oligonucleotide primer
ctgaagagtttgatcatggctc

SEQ ID NO: 613 - DNA, 20 bp, Artificial Sequence
  Synthetic oligonucleotide primer
ctgttgctggatttttgatg

SEQ ID NO: 614 - DNA, 21 bp, Artificial Sequence
  Synthetic oligonucleotide primer
ctaagttcgtcttgagcaatg

SEQ ID NO: 615 - DNA, 23 bp, Artificial Sequence
  Synthetic oligonucleotide primer
cttgacgagcttacatcaagtac

SEQ ID NO: 616 - DNA, 22 bp, Artificial Sequence
  Synthetic oligonucleotide primer
gcataagattctccatagccag

SEQ ID NO: 617 - DNA, 24 bp, Artificial Sequence
  Synthetic oligonucleotide primer
ggtcatatcacacaaattttatcc

SEQ ID NO: 618 - DNA, 23 bp, Artificial Sequence
  Synthetic oligonucleotide primer
ccaatcagtccataaataagatg

SEQ ID NO: 619 - DNA, 21 bp, Artificial Sequence
  Synthetic oligonucleotide primer
cagatatgaacccaagcaagg

SEQ ID NO: 620 - DNA, 20 bp, Artificial Sequence
  Synthetic oligonucleotide primer
gycaagattatttggcactg

SEQ ID NO: 621 - DNA, 20 bp, Artificial Sequence
  Synthetic oligonucleotide primer
catgctgtgctaaatacccc

SEQ ID NO: 622 - DNA, 21 bp, Artificial Sequence
  Synthetic oligonucleotide primer
caggtttaattttgcctgaag

SEQ ID NO: 623 - DNA, 21 bp, Artificial Sequence
  Synthetic oligonucleotide primer
gtattatggaaaaccgccaag

SEQ ID NO: 624 - DNA, 21 bp, Artificial Sequence
  Synthetic oligonucleotide primer
gacaagttgcacagctttgag

SEQ ID NO: 625 - DNA, 20 bp, Artificial Sequence
  Synthetic oligonucleotide primer
gtgcttaatatcgcccaatc

SEQ ID NO: 626 - DNA, 20 bp, Artificial Sequence
  Synthetic oligonucleotide primer
cagcatacgctgaaaaactg

SEQ ID NO: 627 - DNA, 24 bp, Artificial Sequence
  Synthetic oligonucleotide primer
ggtttttggcatttacaataaaac

SEQ ID NO: 628 - DNA, 26 bp, Artificial Sequence
  Synthetic oligonucleotide primer
gcctttgaatattaaacacaaatacc

SEQ ID NO: 629 - DNA, 25 bp, Artificial Sequence
  Synthetic oligonucleotide primer
cctatttatttacataaacgcatag

SEQ ID NO: 630 - DNA, 22 bp, Artificial Sequence
  Synthetic oligonucleotide primer
catgttatctgactgacattcg

SEQ ID NO: 631 - DNA, 20 bp, Artificial Sequence
  Synthetic oligonucleotide primer
cattcagctgtctgatggtg

SEQ ID NO: 632 - DNA, 22 bp, Artificial Sequence
  Synthetic oligonucleotide primer
cttaagcgttggcttatttttg

SEQ ID NO: 633 - DNA, 22 bp, Artificial Sequence
  Synthetic oligonucleotide primer
gcagtacgctgactattaaagc

SEQ ID NO: 634 - DNA, 22 bp, Artificial Sequence
  Synthetic oligonucleotide primer
ctttggtaaactcacccaaaac

SEQ ID NO: 635 - DNA, 20 bp, Artificial Sequence
  Synthetic oligonucleotide primer
cttggttcatctaccccatc

SEQ ID NO: 636 - DNA, 21 bp, Artificial Sequence
  Synthetic oligonucleotide primer
gcggttattattgagagcttg

SEQ ID NO: 637 - DNA, 20 bp, Artificial Sequence
  Synthetic oligonucleotide primer
gcattgggtgtgagtctatg

SEQ ID NO: 638 - DNA, 17 bp, Artificial Sequence
  Synthetic oligonucleotide primer
catcagccatatccgcc

SEQ ID NO: 639 - DNA, 23 bp, Artificial Sequence
  Synthetic oligonucleotide primer
catgttatcaaaaattgcattag

SEQ ID NO: 640 - DNA, 21 bp, Artificial Sequence
  Synthetic oligonucleotide primer
gctattaattccatgatcagc

SEQ ID NO: 641 - DNA, 18 bp, Artificial Sequence
  Synthetic oligonucleotide primer
ccacattacccgtccagg

SEQ ID NO: 642 - DNA, 20 bp, Artificial Sequence
  Synthetic oligonucleotide primer
gtcatcgccaaaagactgac

SEQ ID NO: 643 - DNA, 23 bp, Artificial Sequence
  Synthetic oligonucleotide primer
gatgacttgataccacaaagatg

SEQ ID NO: 644 - DNA, 21 bp, Artificial Sequence
  Synthetic oligonucleotide primer
caaaactggcgattaattcag

SEQ ID NO: 645 - DNA, 21 bp, Artificial Sequence
  Synthetic oligonucleotide primer
ccgctttaatgctatttatgg

SEQ ID NO: 646 - DNA, 19 bp, Artificial Sequence
  Synthetic oligonucleotide primer
gctgacaggcaaatcgtac

SEQ ID NO: 647 - DNA, 23 bp, Artificial Sequence
  Synthetic oligonucleotide primer
cgtttatcacctttatcggtatc

SEQ ID NO: 648 - DNA, 22 bp, Artificial Sequence
  Synthetic oligonucleotide primer
ccggttacaaagataaatttcg

SEQ ID NO: 649 - DNA, 21 bp, Artificial Sequence
  Synthetic oligonucleotide primer
cctataccgatggctcagatc

SEQ ID NO: 650 - DNA, 21 bp, Artificial Sequence
  Synthetic oligonucleotide primer
ctttgttcaaaaactgcaacc

SEQ ID NO: 651 - DNA, 23 bp, Artificial Sequence
  Synthetic oligonucleotide primer
gaaaatcatcaaatatgcaacac

SEQ ID NO: 652 - DNA, 24 bp, Artificial Sequence
  Synthetic oligonucleotide primer
cttgtaattgggtatgattgaatg

SEQ ID NO: 653 - DNA, 20 bp, Artificial Sequence
  Synthetic oligonucleotide primer
gcatcatcatcaagctttcg

SEQ ID NO: 654 - DNA, 25 bp, Artificial Sequence
  Synthetic oligonucleotide primer
gattgaataagtaaaatccaactcc

SEQ ID NO: 655 - DNA, 20 bp, Artificial Sequence
  Synthetic oligonucleotide primer
ccatgcctttgatgaatttg

SEQ ID NO: 656 - DNA, 23 bp, Artificial Sequence
  Synthetic oligonucleotide primer
catggtcatctaaatccaccaac

SEQ ID NO: 657 - DNA, 20 bp, Artificial Sequence
  Synthetic oligonucleotide primer
cagagtggatgaaaaactgg

SEQ ID NO: 658 - DNA, 20 bp, Artificial Sequence
  Synthetic oligonucleotide primer
gattggcataacaagacctg

SEQ ID NO: 659 - DNA, 22 bp, Artificial Sequence
  Synthetic oligonucleotide primer
ctaaaagccaaatgtgatgaac

SEQ ID NO: 660 - DNA, 23 bp, Artificial Sequence
  Synthetic oligonucleotide primer
cgaaaaattaccagaatgtaaag

SEQ ID NO: 661 - DNA, 20 bp, Artificial Sequence
  Synthetic oligonucleotide primer
ggtctctcctgtgagtttgg

SEQ ID NO: 662 - DNA, 18 bp, Artificial Sequence
  Synthetic oligonucleotide primer
gtcatgccagcagatgag

SEQ ID NO: 663 - DNA, 25 bp, Artificial Sequence
  Synthetic oligonucleotide primer
cagtgataacatacataaaagttgc

SEQ ID NO: 664 - DNA, 23 bp, Artificial Sequence
  Synthetic oligonucleotide primer
gcatattatgccgataaaatctc

SEQ ID NO: 665 - DNA, 22 bp, Artificial Sequence
  Synthetic oligonucleotide primer
ctaaaaataaacgcccaaagac

SEQ ID NO: 666 - DNA, 23 bp, Artificial Sequence
  Synthetic oligonucleotide primer
caactcagatgtactgtgctttc

SEQ ID NO: 667 - DNA, 22 bp, Artificial Sequence
  Synthetic oligonucleotide primer
caagatccgtttgtttattctg

SEQ ID NO: 668 - DNA, 23 bp, Artificial Sequence
  Synthetic oligonucleotide primer
gataagatgcctcatcaataacc

SEQ ID NO: 669 - DNA, 20 bp, Artificial Sequence
  Synthetic oligonucleotide primer
gaagccaatctgctatttgg

SEQ ID NO: 670 - DNA, 22 bp, Artificial Sequence
  Synthetic oligonucleotide primer
gataccacatcctgaaatttgg

SEQ ID NO: 671 - DNA, 20 bp, Artificial Sequence
  Synthetic oligonucleotide primer
ctcggtttcaagttttgctg

SEQ ID NO: 672 - DNA, 22 bp, Artificial Sequence
  Synthetic oligonucleotide primer
ctttatcatcagcaccttcacc

SEQ ID NO: 673 - DNA, 19 bp, Artificial Sequence
  Synthetic oligonucleotide primer
ctgtacacccaaggcattg

SEQ ID NO: 674 - DNA, 22 bp, Artificial Sequence
  Synthetic oligonucleotide primer
gacactcatcagtcatttacgc

SEQ ID NO: 675 - DNA, 21 bp, Artificial Sequence
  Synthetic oligonucleotide primer
gtaaatttggtttggtggatg

SEQ ID NO: 676 - DNA, 19 bp, Artificial Sequence
  Synthetic oligonucleotide primer
gctgtgagccattaacagc

SEQ ID NO: 677 - DNA, 20 bp, Artificial Sequence
  Synthetic oligonucleotide primer
ggtgctcctaggataaatgc

SEQ ID NO: 678 - DNA, 20 bp, Artificial Sequence
  Synthetic oligonucleotide primer
gaactgcatcgtcctagctc

SEQ ID NO: 679 - DNA, 20 bp, Artificial Sequence
  Synthetic oligonucleotide primer
ccatattctcccaaaaatgc

SEQ ID NO: 680 - DNA, 21 bp, Artificial Sequence
  Synthetic oligonucleotide primer
ccaaactgcctgattgtaatg

SEQ ID NO: 681 - DNA, 19 bp, Artificial Sequence
  Synthetic oligonucleotide primer
gccgatgtattaggtttgc

SEQ ID NO: 682 - DNA, 20 bp, Artificial Sequence
  Synthetic oligonucleotide primer
ctacyaaggcaccatctagc

SEQ ID NO: 683 - DNA, 21 bp, Artificial Sequence
  Synthetic oligonucleotide primer
gatgcctgattatcctttgtg

SEQ ID NO: 684 - DNA, 22 bp, Artificial Sequence
  Synthetic oligonucleotide primer
ctgataaaaagcgttcagtttg

SEQ ID NO: 685 - DNA, 20 bp, Artificial Sequence
  Synthetic oligonucleotide primer
caaagaggtggtgattggtg

SEQ ID NO: 686 - DNA, 23 bp, Artificial Sequence
  Synthetic oligonucleotide primer
gttgcataattttcctttcaatg

SEQ ID NO: 687 - DNA, 22 bp, Artificial Sequence
  Synthetic oligonucleotide primer
ctgaatttacagttaaaacggc

SEQ ID NO: 688 - DNA, 20 bp, Artificial Sequence
  Synthetic oligonucleotide primer
caagaattacgctcaagtgc

SEQ ID NO: 689 - DNA, 19 bp, Artificial Sequence
  Synthetic oligonucleotide primer
cagccgtagcctcaaatag

SEQ ID NO: 690 - DNA, 21 bp, Artificial Sequence
  Synthetic oligonucleotide primer
gcgatatcactgctttgattg

SEQ ID NO: 691 - DNA, 22 bp, Artificial Sequence
  Synthetic oligonucleotide primer
catatttgactaccgctattcg

SEQ ID NO: 692 - DNA, 24 bp, Artificial Sequence
  Synthetic oligonucleotide primer
ctgcttattttatccatttgactg

SEQ ID NO: 693 - DNA, 20 bp, Artificial Sequence
  Synthetic oligonucleotide primer
gcaatcaatgtttgacgacg

SEQ ID NO: 694 - DNA, 21 bp, Artificial Sequence
  Synthetic oligonucleotide primer
gtggctcaccttgttcaatag

SEQ ID NO: 695 - DNA, 20 bp, Artificial Sequence
  Synthetic oligonucleotide primer
gggtgagtttaccaccaatc

SEQ ID NO: 696 - DNA, 20 bp, Artificial Sequence
  Synthetic oligonucleotide primer
cagcatctgagctgtctttg

SEQ ID NO: 697 - DNA, 20 bp, Artificial Sequence
  Synthetic oligonucleotide primer
gctcagcaaaccaaaataac

SEQ ID NO: 698 - DNA, 20 bp, Artificial Sequence
  Synthetic oligonucleotide primer
ccaaggattggtcaaagaac

SEQ ID NO: 699 - DNA, 21 bp, Artificial Sequence
  Synthetic oligonucleotide primer
caggtttacctgtgacaatgg

SEQ ID NO: 700 - DNA, 20 bp, Artificial Sequence
  Synthetic oligonucleotide primer
gatggctcaaaaacaaaagc

SEQ ID NO: 701 - DNA, 20 bp, Artificial Sequence
  Synthetic oligonucleotide primer
cacaccgcttggacaatatg

SEQ ID NO: 702 - DNA, 21 bp, Artificial Sequence
  Synthetic oligonucleotide primer
caattggactgaccgaatcac

SEQ ID NO: 703 - DNA, 20 bp, Artificial Sequence
  Synthetic oligonucleotide primer
cgaccagcattagcaatctg

SEQ ID NO: 704 - DNA, 23 bp, Artificial Sequence
  Synthetic oligonucleotide primer
gattgacattcgtgatgaatttg

SEQ ID NO: 705 - DNA, 20 bp, Artificial Sequence
  Synthetic oligonucleotide primer
caatgaaactgccctaagag

SEQ ID NO: 706 - DNA, 20 bp, Artificial Sequence
  Synthetic oligonucleotide primer
tggtgatattgagggtttcc

SEQ ID NO: 707 - DNA, 25 bp, Artificial Sequence
  Synthetic oligonucleotide primer
cattattatcaccaagacaaagatg

SEQ ID NO: 708 - DNA, 24 bp, Artificial Sequence
  Synthetic oligonucleotide primer
ccaacgattattatcataaaaagc

SEQ ID NO: 709 - DNA, 21 bp, Artificial Sequence
  Synthetic oligonucleotide primer
cttgttggcgttgatttattc

SEQ ID NO: 710 - DNA, 20 bp, Artificial Sequence
  Synthetic oligonucleotide primer
cagtggtcatcgcaagtaac

SEQ ID NO: 711 - DNA, 19 bp, Artificial Sequence
  Synthetic oligonucleotide primer
caatagggcgtttgtatgc

SEQ ID NO: 712 - DNA, 22 bp, Artificial Sequence
  Synthetic oligonucleotide primer
ctgaccccaatcttcaaaatag

SEQ ID NO: 713 - DNA, 21 bp, Artificial Sequence
  Synthetic oligonucleotide primer
gctcgtggtgagactaaaatg

SEQ ID NO: 714 - DNA, 22 bp, Artificial Sequence
  Synthetic oligonucleotide primer
cacataatgccaaacttaaagc

SEQ ID NO: 715 - DNA, 23 bp, Artificial Sequence
  Synthetic oligonucleotide primer
gctgtgaaaagcagtattaaacc

SEQ ID NO: 716 - DNA, 22 bp, Artificial Sequence
  Synthetic oligonucleotide primer
ccataactttaacaccgcctac

SEQ ID NO: 717 - DNA, 20 bp, Artificial Sequence
  Synthetic oligonucleotide primer
gctttactttacggcattgg

SEQ ID NO: 718 - DNA, 19 bp, Artificial Sequence
  Synthetic oligonucleotide primer
ccaatggcatcttgatttg

SEQ ID NO: 719 - DNA, 25 bp, Artificial Sequence
  Synthetic oligonucleotide primer
cgctgagaaatatgcttattatacc

SEQ ID NO: 720 - DNA, 19 bp, Artificial Sequence
  Synthetic oligonucleotide primer
ccatttgggtatcggcttg

SEQ ID NO: 721 - DNA, 21 bp, Artificial Sequence
  Synthetic oligonucleotide primer
caagaaagtagcgttgatgag

SEQ ID NO: 722 - DNA, 20 bp, Artificial Sequence
  Synthetic oligonucleotide primer
caatcgccttaaaagatgac

SEQ ID NO: 723 - DNA, 19 bp, Artificial Sequence
  Synthetic oligonucleotide primer
gttgccacggtaaatttgc

SEQ ID NO: 724 - DNA, 23 bp, Artificial Sequence
  Synthetic oligonucleotide primer
cttgtgaccatataccacaaacc

SEQ ID NO: 725 - DNA, 25 bp, Artificial Sequence
  Synthetic oligonucleotide primer
ctgatatttttatcgctgtcaatac

SEQ ID NO: 726 - DNA, 18 bp, Artificial Sequence
  Synthetic oligonucleotide primer
gctgcccagtgcttcaac

SEQ ID NO: 727 - DNA, 17 bp, Artificial Sequence
  Synthetic oligonucleotide primer
gacgggcgtatctgcag

SEQ ID NO: 728 - DNA, 20 bp, Artificial Sequence
  Synthetic oligonucleotide primer
ctaggcttgataacgcactg

SEQ ID NO: 729 - DNA, 21 bp, Artificial Sequence
  Synthetic oligonucleotide primer
ctgtgacatttggctttagtg

SEQ ID NO: 730 - DNA, 19 bp, Artificial Sequence
  Synthetic oligonucleotide primer
ctattggcctgcgtatagc

SEQ ID NO: 731 - DNA, 20 bp, Artificial Sequence
  Synthetic oligonucleotide primer
caaaagcattggacaaagtc

SEQ ID NO: 732 - DNA, 20 bp, Artificial Sequence
  Synthetic oligonucleotide primer
ggcattaaaatcaccacctg

SEQ ID NO: 733 - DNA, 23 bp, Artificial Sequence
  Synthetic oligonucleotide primer
gacttatccaacccaaaatgaag

SEQ ID NO: 734 - DNA, 20 bp, Artificial Sequence
  Synthetic oligonucleotide primer
cttcgacctgtgataatggc

SEQ ID NO: 735 - DNA, 21 bp, Artificial Sequence
  Synthetic oligonucleotide primer
gtgatgatgagcaaacagacg

SEQ ID NO: 736 - DNA, 25 bp, Artificial Sequence
  Synthetic oligonucleotide primer
caatctgcttgatacctttatcttg

SEQ ID NO: 737 - DNA, 22 bp, Artificial Sequence
  Synthetic oligonucleotide primer
ggactgagtctggtgaagaagc

SEQ ID NO: 738 - DNA, 24 bp, Artificial Sequence
  Synthetic oligonucleotide primer
gacctacctcaatcacaaatcaag

SEQ ID NO: 739 - DNA, 20 bp, Artificial Sequence
  Synthetic oligonucleotide primer
ggtatcattggcaaaaatgg

SEQ ID NO: 740 - DNA, 20 bp, Artificial Sequence
  Synthetic oligonucleotide primer
gtaaaaacgcccattcaaac

SEQ ID NO: 741 - DNA, 20 bp, Artificial Sequence
  Synthetic oligonucleotide primer
cagcacctttggataacatc

SEQ ID NO: 742 - DNA, 19 bp, Artificial Sequence
  Synthetic oligonucleotide primer
caacttgtttttgcatggc

SEQ ID NO: 743 - DNA, 19 bp, Artificial Sequence
  Synthetic oligonucleotide primer
ctgatgataaggcggtgag

SEQ ID NO: 744 - DNA, 20 bp, Artificial Sequence
  Synthetic oligonucleotide primer
caataatgaatggcgttttg

SEQ ID NO: 745 - DNA, 20 bp, Artificial Sequence
  Synthetic oligonucleotide primer
cgaagcgttgaaatttatgg

SEQ ID NO: 746 - DNA, 22 bp, Artificial Sequence
  Synthetic oligonucleotide primer
gatatgggtaatgtttttgacc

SEQ ID NO: 747 - DNA, 20 bp, Artificial Sequence
  Synthetic oligonucleotide primer
ctcaaactgtgccaagaatg

SEQ ID NO: 748 - DNA, 22 bp, Artificial Sequence
  Synthetic oligonucleotide primer
ccgataaataatccaaaaaatc

SEQ ID NO: 749 - DNA, 21 bp, Artificial Sequence
  Synthetic oligonucleotide primer
caaaggtgaaattgcggatac

SEQ ID NO: 750 - DNA, 20 bp, Artificial Sequence
  Synthetic oligonucleotide primer
gcttaatctgagcgacatcc

SEQ ID NO: 751 - DNA, 22 bp, Artificial Sequence
  Synthetic oligonucleotide primer
caaaacctgatagaagccattg

SEQ ID NO: 752 - DNA, 25 bp, Artificial Sequence
  Synthetic oligonucleotide primer
ctatgatgtaagttcggataagtgc

SEQ ID NO: 753 - DNA, 19 bp, Artificial Sequence
  Synthetic oligonucleotide primer
gtacgccttttgcactcag

SEQ ID NO: 754 - DNA, 20 bp, Artificial Sequence
  Synthetic oligonucleotide primer
cgataaaaggtgcattaccg

SEQ ID NO: 755 - DNA, 19 bp, Artificial Sequence
  Synthetic oligonucleotide primer
gatttttaaagccccatcg

SEQ ID NO: 756 - DNA, 20 bp, Artificial Sequence
  Synthetic oligonucleotide primer
ctaagggcaaaaacacaagg

SEQ ID NO: 757 - DNA, 19 bp, Artificial Sequence
  Synthetic oligonucleotide primer
catctcaggctgcccttac

SEQ ID NO: 758 - DNA, 20 bp, Artificial Sequence
  Synthetic oligonucleotide primer
ctgtcatatttggcttgtgc

SEQ ID NO: 759 - DNA, 20 bp, Artificial Sequence
  Synthetic oligonucleotide primer
ctgggttcatcaggtaaagg

SEQ ID NO: 760 - DNA, 20 bp, Artificial Sequence
  Synthetic oligonucleotide primer
caatttctttgttgccattg

SEQ ID NO: 761 - DNA, 17 bp, Artificial Sequence
  Synthetic oligonucleotide primer
ggccaattttcgtacgc

SEQ ID NO: 762 - DNA, 17 bp, Artificial Sequence
  Synthetic oligonucleotide primer
gttcagcccaacggttg

SEQ ID NO: 763 - DNA, 26 bp, Artificial Sequence
  Synthetic oligonucleotide primer
gatcagatttatcctctttttacctg

SEQ ID NO: 764 - DNA, 26 bp, Artificial Sequence
  Synthetic oligonucleotide primer
gtattcctttattctaccgttgtttt

SEQ ID NO: 765 - DNA, 20 bp, Artificial Sequence
  Synthetic oligonucleotide primer
gagctacaagtcggcgatac

SEQ ID NO: 766 - DNA, 22 bp, Artificial Sequence
  Synthetic oligonucleotide primer
ctgcttggcaataaaacattac

SEQ ID NO: 767 - DNA, 19 bp, Artificial Sequence
  Synthetic oligonucleotide primer
gaggacattacccaaacgg

SEQ ID NO: 768 - DNA, 21 bp, Artificial Sequence
  Synthetic oligonucleotide primer
ctaagtccttaggttgcatgg

SEQ ID NO: 769 - DNA, 19 bp, Artificial Sequence
  Synthetic oligonucleotide primer
gctgatggcaggtttaccc

SEQ ID NO: 770 - DNA, 19 bp, Artificial Sequence
  Synthetic oligonucleotide primer
ccacaaatatatcgccccg

SEQ ID NO: 771 - DNA, 19 bp, Artificial Sequence
  Synthetic oligonucleotide primer
ggagctggcaggtaaattc

SEQ ID NO: 772 - DNA, 22 bp, Artificial Sequence
  Synthetic oligonucleotide primer
gcaataataatggcagataatg

SEQ ID NO: 773 - DNA, 24 bp, Artificial Sequence
  Synthetic oligonucleotide primer
cattatttatggacaaacaaaatg

SEQ ID NO: 774 - DNA, 22 bp, Artificial Sequence
  Synthetic oligonucleotide primer
gtttgtgatggacaaaatacgg

SEQ ID NO: 775 - DNA, 25 bp, Artificial Sequence
  Synthetic oligonucleotide primer
ccgtctatgattgatataatttgtg

SEQ ID NO: 776 - DNA, 22 bp, Artificial Sequence
  Synthetic oligonucleotide primer
gataagcattatggtcgctatg

SEQ ID NO: 777 - DNA, 18 bp, Artificial Sequence
  Synthetic oligonucleotide primer
ggtaaagattggggcgtg

SEQ ID NO: 778 - DNA, 23 bp, Artificial Sequence
  Synthetic oligonucleotide primer
gcattgttatccacctcttttac

SEQ ID NO: 779 - DNA, 21 bp, Artificial Sequence
  Synthetic oligonucleotide primer
ggcatagtcgcatcatttaag

SEQ ID NO: 780 - DNA, 19 bp, Artificial Sequence
  Synthetic oligonucleotide primer
gtttattgacgctggttgg

SEQ ID NO: 781 - DNA, 23 bp, Artificial Sequence
  Synthetic oligonucleotide primer
cctaacaataagcaaaactcttg

SEQ ID NO: 782 - DNA, 20 bp, Artificial Sequence
  Synthetic oligonucleotide primer
gcaaaataaaaggcaaaaac

SEQ ID NO: 783 - DNA, 20 bp, Artificial Sequence
  Synthetic oligonucleotide primer
ccatcagactcaccatcttc

SEQ ID NO: 784 - DNA, 21 bp, Artificial Sequence
  Synthetic oligonucleotide primer
ggcataagcttttaggctttc

SEQ ID NO: 785 - DNA, 22 bp, Artificial Sequence
  Synthetic oligonucleotide primer
gttaatgtcggtatgcagcttg

SEQ ID NO: 786 - DNA, 21 bp, Artificial Sequence
  Synthetic oligonucleotide primer
gaagtatcttggtggtcaacg

SEQ ID NO: 787 - DNA, 20 bp, Artificial Sequence
  Synthetic oligonucleotide primer
ggcgaattaaccttatctgg

SEQ ID NO: 788 - DNA, 23 bp, Artificial Sequence
  Synthetic oligonucleotide primer
gttaaattatcatgattggcttg

SEQ ID NO: 789 - DNA, 21 bp, Artificial Sequence
  Synthetic oligonucleotide primer
gggtaaaggcacaaaagacac

SEQ ID NO: 790 - DNA, 21 bp, Artificial Sequence
  Synthetic oligonucleotide primer
ggctttgtacaactggctacc

SEQ ID NO: 791 - DNA, 24 bp, Artificial Sequence
  Synthetic oligonucleotide primer
caaaacttttaccataccaagatg

SEQ ID NO: 792 - DNA, 21 bp, Artificial Sequence
  Synthetic oligonucleotide primer
cgctcaaaatatgctgtaacg

SEQ ID NO: 793 - DNA, 20 bp, Artificial Sequence
  Synthetic oligonucleotide primer
gttcacccacttgctgacat

SEQ ID NO: 794 - DNA, 17 bp, Artificial Sequence
  Synthetic oligonucleotide primer
cacatgcagaccgccac

SEQ ID NO: 795 - DNA, 24 bp, Artificial Sequence
  Synthetic oligonucleotide primer
gatatcagccatattgataagcac

SEQ ID NO: 796 - DNA, 23 bp, Artificial Sequence
  Synthetic oligonucleotide primer
gagcgagtrgacacacgataatg

SEQ ID NO: 797 - DNA, 21 bp, Artificial Sequence
  Synthetic oligonucleotide primer
cgatggtatttggtatgaagc

SEQ ID NO: 798 - DNA, 20 bp, Artificial Sequence
  Synthetic oligonucleotide primer
gtaaatctccccacgatgac

SEQ ID NO: 799 - DNA, 21 bp, Artificial Sequence
  Synthetic oligonucleotide primer
gggcaaatctatgaatgaagc

SEQ ID NO: 800 - DNA, 19 bp, Artificial Sequence
  Synthetic oligonucleotide primer
caaagcgatattgctcacc

SEQ ID NO: 801 - DNA, 25 bp, Artificial Sequence
  Synthetic oligonucleotide primer
gttaaaaatgatgatggttagattg

SEQ ID NO: 802 - DNA, 20 bp, Artificial Sequence
  Synthetic oligonucleotide primer
ctgataaaatccctggatgg

SEQ ID NO: 803 - DNA, 21 bp, Artificial Sequence
  Synthetic oligonucleotide primer
gaagcagcttggaataaacag

SEQ ID NO: 804 - DNA, 19 bp, Artificial Sequence
  Synthetic oligonucleotide primer
gcccttgcaaaattaggac

SEQ ID NO: 805 - DNA, 17 bp, Artificial Sequence
  Synthetic oligonucleotide primer
ggcaatgtgcttgaccc

SEQ ID NO: 806 - DNA, 20 bp, Artificial Sequence
  Synthetic oligonucleotide primer
cacctgcttctccacttctg

SEQ ID NO: 807 - DNA, 20 bp, Artificial Sequence
  Synthetic oligonucleotide primer
cgagatttgtggcaatttag

SEQ ID NO: 808 - DNA, 21 bp, Artificial Sequence
  Synthetic oligonucleotide primer
cgtggtatctttgacatcatc

SEQ ID NO: 809 - DNA, 21 bp, Artificial Sequence
  Synthetic oligonucleotide primer
ccaaaaataatcggtacggtc

SEQ ID NO: 810 - DNA, 22 bp, Artificial Sequence
  Synthetic oligonucleotide primer
catggttataaaacaacggatg

SEQ ID NO: 811 - DNA, 20 bp, Artificial Sequence
  Synthetic oligonucleotide primer
caagtacccatcatcacagg

SEQ ID NO: 812 - DNA, 20 bp, Artificial Sequence
  Synthetic oligonucleotide primer
cgtattggcaagtaaaaagc

SEQ ID NO: 813 - DNA, 22 bp, Artificial Sequence
  Synthetic oligonucleotide primer
gcgattgttaccaaaaccttag

SEQ ID NO: 814 - DNA, 23 bp, Artificial Sequence
  Synthetic oligonucleotide primer
caaaattaatattagcccctttg

SEQ ID NO: 815 - DNA, 20 bp, Artificial Sequence
  Synthetic oligonucleotide primer
ccaatgacttttgggatatg

SEQ ID NO: 816 - DNA, 23 bp, Artificial Sequence
  Synthetic oligonucleotide primer
cataagttcgtgttttgtgctag

SEQ ID NO: 817 - DNA, 20 bp, Artificial Sequence
  Synthetic oligonucleotide primer
cttttggtgtgggtgttgtg

SEQ ID NO: 818 - DNA, 21 bp, Artificial Sequence
  Synthetic oligonucleotide primer
ggcatctatcgctggtagtag

SEQ ID NO: 819 - DNA, 21 bp, Artificial Sequence
  Synthetic oligonucleotide primer
gtgccaagtctatgtcattgc

SEQ ID NO: 820 - DNA, 20 bp, Artificial Sequence
  Synthetic oligonucleotide primer
ccagactcaatctgttcacg

SEQ ID NO: 821 - DNA, 19 bp, Artificial Sequence
  Synthetic oligonucleotide primer
ccaaaacggttgaagaatg

SEQ ID NO: 822 - DNA, 21 bp, Artificial Sequence
  Synthetic oligonucleotide primer
gttaaaaccctccatgaatgc

SEQ ID NO: 823 - DNA, 20 bp, Artificial Sequence
  Synthetic oligonucleotide primer
gcagctcactacgacctttc

SEQ ID NO: 824 - DNA, 20 bp, Artificial Sequence
  Synthetic oligonucleotide primer
ctaacctttgttcggcagtg

SEQ ID NO: 825 - DNA, 20 bp, Artificial Sequence
  Synthetic oligonucleotide primer
gataatgacgctcaaactgg

SEQ ID NO: 826 - DNA, 20 bp, Artificial Sequence
  Synthetic oligonucleotide primer
ctggcgtatattgaccagac

SEQ ID NO: 827 - DNA, 19 bp, Artificial Sequence
  Synthetic oligonucleotide primer
gcacgccaagcatcttatc

SEQ ID NO: 828 - DNA, 18 bp, Artificial Sequence
  Synthetic oligonucleotide primer
cacaccgtcagcatcttc

SEQ ID NO: 829 - DNA, 20 bp, Artificial Sequence
  Synthetic oligonucleotide primer
ccatacaggagtgcattttc

SEQ ID NO: 830 - DNA, 22 bp, Artificial Sequence
  Synthetic oligonucleotide primer
cgaactctctattccattgttc

SEQ ID NO: 831 - DNA, 23 bp, Artificial Sequence
  Synthetic oligonucleotide primer
gtttgctcaggctcaaaataatc

SEQ ID NO: 832 - DNA, 21 bp, Artificial Sequence
  Synthetic oligonucleotide primer
ggtcaatgatgatggcatttg

SEQ ID NO: 833 - DNA, 20 bp, Artificial Sequence
  Synthetic oligonucleotide primer
gaacaacggctaaaacttgc

SEQ ID NO: 834 - DNA, 16 bp, Artificial Sequence
  Synthetic oligonucleotide primer
cgcttgccagcgtacc

SEQ ID NO: 835 - DNA, 18 bp, Artificial Sequence
  Synthetic oligonucleotide primer
gatggcggtgtgtgtttg

SEQ ID NO: 836 - DNA, 22 bp, Artificial Sequence
  Synthetic oligonucleotide primer
cctttgaatttgaccagtacag

SEQ ID NO: 837 - DNA, 19 bp, Artificial Sequence
  Synthetic oligonucleotide primer
gttggggctttgatgacac

SEQ ID NO: 838 - DNA, 20 bp, Artificial Sequence
  Synthetic oligonucleotide primer
cccaagcctactaaaagcag

SEQ ID NO: 839 - DNA, 23 bp, Artificial Sequence
  Synthetic oligonucleotide primer
ggttcatgataaaatcaggtagg

SEQ ID NO: 840 - DNA, 18 bp, Artificial Sequence
  Synthetic oligonucleotide primer
gccctgacattccgctac

SEQ ID NO: 841 - DNA, 20 bp, Artificial Sequence
  Synthetic oligonucleotide primer
gagtgatgatttgcctgatg

SEQ ID NO: 842 - DNA, 21 bp, Artificial Sequence
  Synthetic oligonucleotide primer
gtgcagtcgttaaagatgacg

SEQ ID NO: 843 - DNA, 20 bp, Artificial Sequence
  Synthetic oligonucleotide primer
gaacccatatggtcagcttc

SEQ ID NO: 844 - DNA, 20 bp, Artificial Sequence
  Synthetic oligonucleotide primer
gccattaaacttgccaaaac

SEQ ID NO: 845 - DNA, 19 bp, Artificial Sequence
  Synthetic oligonucleotide primer
gttgctgcactgcctaaag

SEQ ID NO: 846 - DNA, 20 bp, Artificial Sequence
  Synthetic oligonucleotide primer
gaggtgcgataagactgtcg

SEQ ID NO: 847 - DNA, 22 bp, Artificial Sequence
  Synthetic oligonucleotide primer
gataagaccatcaagtgcagag

SEQ ID NO: 848 - DNA, 21 bp, Artificial Sequence
  Synthetic oligonucleotide primer
cttagtatgtttggcgagacc

SEQ ID NO: 849 - DNA, 23 bp, Artificial Sequence
  Synthetic oligonucleotide primer
cggatattgctaataacatcaac

SEQ ID NO: 850 - DNA, 17 bp, Artificial Sequence
  Synthetic oligonucleotide primer
cgaccaaacgctgatcg

SEQ ID NO: 851 - DNA, 21 bp, Artificial Sequence
  Synthetic oligonucleotide primer
gtgatcgatttttgtcgtgag

SEQ ID NO: 852 - DNA, 23 bp, Artificial Sequence
  Synthetic oligonucleotide primer
ctattgcttcgatgactcgttac

SEQ ID NO: 853 - DNA, 19 bp, Artificial Sequence
  Synthetic oligonucleotide primer
cgaatatggcaaaaagctg

SEQ ID NO: 854 - DNA, 20 bp, Artificial Sequence
  Synthetic oligonucleotide primer
gccgtttcaatgatagttgc

SEQ ID NO: 855 - DNA, 20 bp, Artificial Sequence
  Synthetic oligonucleotide primer
catcagcatacccacagttg

SEQ ID NO: 856 - DNA, 20 bp, Artificial Sequence
  Synthetic oligonucleotide primer
ggcattgcccatagttttag

SEQ ID NO: 857 - DNA, 26 bp, Artificial Sequence
  Synthetic oligonucleotide
  misc_feature (1)..(1): n is inosine
  misc_feature (3)..(3): n is inosine
  misc_feature (5)..(5): n is inosine
  misc_feature (7)..(7): n is inosine
  misc_feature (9)..(9): n is inosine
  misc_feature (11)..(11): n is inosine
  misc_feature (13)..(13): n is inosine
  misc_feature (15)..(15): n is inosine
  misc_feature (17)..(17): n is inosine
  misc_feature (19)..(19): n is inosine
  misc_feature (21)..(21): n is inosine
  misc_feature (23)..(23): n is inosine
  misc_feature (25)..(25): n is inosine
ncncncncncncncncncncncncnc

SEQ ID NO: 858 - protein, 11 aa, Artificial Sequence
  Synthetic peptide
KLKLLLLLKLK

SEQ ID NO: 859 - protein, 36 aa, Mus musculus
RLAGLLRKGGEKIGEKLKKIGQKIKNFFQKLVPQPE

SEQ ID NO: 860 - DNA, 1350 bp, Artificial Sequence
  Construct 1: MCRH0357-1 nt
aatgattctcccaatcttagcaacagtgcatttcagcagtgtcttagcactttaaaaaacagtagtacctttcggagtgtctctggggtgacatttgaaaaatatcgcccatcgcagcctgatcccagcgtcattcgctcgctcaattatcagcctgaatttaaaaaagatgtttgggattatttggcgtctttggtagacagtgagcgtgtccaagacggtatccgtgccaagcatgagcaagctgatgtgctacgccgcattgagagccgctatggcgtcaagcctgagcatgtactgggcgtctggggcgttgagagtaattttggtcagacgctgggtaaaaaaaatttatttgatagcctagcgactttgtcttgttttgatcgtcgccaaagttattttcgtggtgaatatgccaatgcactaaaaattgtccaaaatggtgatattcgccctgaggatatgacaggttcttgggcgggagcatttggtcagacacagtttatgccgagcacctttttggagcttgcggtggattttgatggtgatgggcgtaaagatttggtcaactcaaaagccgatgcattggcaagtactgccaatttcttggtgaaacgaggctatcgcctaggcgaaccttggggctatgaagtgcgtcttaatggctataatggctcaagcggtcgtcgcaataagcaatcaatcaaccactggcgtgctcaaggcatcaccttgccaaatgggcaacctatcccaaataatatggcatcagcaggtttactactgcccgctggtaggcagggtcctgcattcttagttggtaagaattttgatactttttattcttataatgcctcagaaagctatgcgttagccatcgctcagctgtctgatcttgtgcgtgatgaaaataccaataccaactttgccacaccttggccgacagacgaccctggtatcggtcgccgtgaatccaaagaaatccagcaagcactcatcaatgctggctatgacatcggtgcggtcgatggcatcatcggtgataatacacgccaagcaattatggattatcagcgaaaagttggtgtgatgcccgatggtcgagcaggtcaaaagtttcaccgattaattactggtcgcactgcttccatccaatctgcccaaacaccagcccagtccataaatacgcccacaacccagtatcactcagtacagccaactgtcagcacgcaagccaatgcagcgagggcggtaattgtcaagccagcaaatactccgcctaccacagggacgacctatcggcgtgtcatcaatgccgatggcagctcatcttggatattagttaaa

SEQ ID NO: 861 - DNA, 513 bp, Artificial Sequence
  Construct 2: MCRH0391-1 nt
accaacatacaaccaagcacccaaacgcccaccaccctgcctactgcggatacccctcttaaatttgcggtcacaggtaaaatcggcgtggttaccaccacccccgaaggtaggcaagcaggtagtgccttttatacttggacacaagaagatgatcgcttcgctattgaattgacaggtatgcttggtattggtgcaacccaaatccgttataacgggacaactgccgccttggacagtgaacgcacaggcacgataactgccgatacgcctgaagcacttttattgactgcaacaggctggcaagcaccaatctctcagctaccacactggatcttaggacgcggtgctcctgatgacagcacagccggctatgatcacttaggtcggctggtgtctgctgctaatggtgcatggcatgcccaatttgattacgacaaaacctctttgccgtcacgccttcgcatcacacataccaaccagcacagtataaccatgacagtaacacatcaa

SEQ ID NO: 862 - DNA, 717 bp, Artificial Sequence
  Construct 3: MCRH0546-1 nt
aaaactgacaccaatgccatggcaagcatcaaaggtggcacatatcgccctttatacttaagtgaagacagccccatggtgaccgtgggtaattttcacattgataaaacacccataactaaccaacaatttgccaaatttgtcgcaaataatcccaaatggcaaaaacaaaacatcgccaagctttttgctgaacctgactatttggctcactggcaaaaaacaagcaaaggctattatccaaactcagccgatattgataaacctgtggtgaatgtctcatggtatgccgccaacgcttattgtaaagcgcaaggcaaacgcttacctaagattgcagaatgggaatatgtcgcacaagcgtcaaccactcgcatcaatggcagccaagaaaaagggtataaccaaaccattttagactggtataccaaatctgccaccatgccattaaagcgtgtggcccaaagcccagccaactactggggtgtgtatgacatgcacggcttgatttgggaatggacacaagactttaacagcaatctggtgtcaggtgaatcacgagcagacagcacattaaaccaaaccatgttttgtggttctggtgcagcaggtgcacccgacccatcagattatgccgcttttatgcgttacggctttcgatcaagcttacaatctcaatttgccctaaaaagcttgggatttcgctgtgcaaaagat

SEQ ID NO: 863 - DNA, 420 bp, Artificial Sequence
  Construct 4: MCRH0759-1 nt
gataataccaagctgggtgaagagccaaccaccaccttaaagggtgtattggtaagctcgcaaacgaaccaaaatacaggttttgtatctaatgattcaaaacaatccagtgatcttacgctttcaaaagataaattaaaatatcgttcggcaaccttgggcaatgcgttaagtggtgagcttggtattcatagtaacccttttggtggcggttcatctgcacctgttgtgcgagggcaagagggtgtgcgtcttaagattttacaaaatggaactgatgtgattgatgtgtcatcaatatcgcctgatcatgttgtggcgaccgatacacttttagcgtctaaagttgagcttgttcgtggtgctgatacgctgttatatggcttggcatcgccagctggtgtgattaatgttgttgat

SEQ ID NO: 864 - DNA, 2280 bp, Artificial Sequence
  Construct 5: MCRH0759-2 nt
ggtgtgattaatgttgttgatgaccgtatcccgaatcgtatgcctagtggtgctatccatgacaaaatcgaaggcgagacgatgcttcgatataacacaaacaaccatgaaaagcttgcaactgcaggggtgagctttggggtaggagatcgcattgcggttcgggtggagggcttaaagcgagaggctgatgactatcaagttccccattttcaggcagatcgcatgttagattatgtgccaggtagtgcaaataactctaccgttggcatgattggcgtgtcttatattcatgataatgggcatatcggtgcttcttatagccaccgtaaagatcgttatggtatcccagggcatatccactgcgacagccaacgagagcattttatcaaatggcataatatcacaaaatccaattattatttacccatttatcctcatttgatggaggattcagatattgatgacaatcctcatacgcattgccgccacaaccacgaagaccatatcggtgagcataatcccacgggcgtgcccatcaatcatgaacatcattcgccttggattgatatgaaaaccaatcgctacgacattcgtggcgaggtatatcggcctattcaaggtttggataaaattaagctaagcttaacttatgcagattattatcatgatgaaaaagatgctggcaatgagcaagacccaaacaatcacaaaccttctgagcgtgatacaacggtggataagggtcatgccagctctatttttacaaaaaaaggcgttaatggtcgcttggagttatatcatacaccgaccaaacgcttatctggggtattgggtattgggtatcaaacccaaaaatctgcagcaggagaggcgtatttgccaagctattttcaatcagaagcagaatggcaaaaagcccaaagtcaaaacattaaccaatatcgtccttacttattagttccaaataccaataaaagccttggtatttttggacttgagcaactaaagctaaatcaaatgacttttaaggtggcgatgcgtcatgaaagacaaaaaacaccaattgaatatgaccagcatttacttgaccatgctttgcagtattttttaagtaaagcacagctaaaagcacctgatcatcctgatttgacgacatataaacaacatgccacctcttatgctggtagtgccttatgggatattacgccaaatcatcgattgtcattgacctactcacataacgaacgcattccatcaccgatggagctgtattatcaaggagggcatttggcgaccagctcttttgagcatggcaataaaaacttggtcaaagaaaaatcggataattatgagctgggttttatgcatacagcagataaagtcagctataaagcaagcacttactatagcaattttgataattatatctttaatgagaccgttgccaaagaaggaaatttatacatcagacgctataatcagacgacagctaagttttatggtgtggagggttcattaacttaccagccaaatgccaatcacagtgtgatgttttttggtgatatggtgcaaggtaaaattggtgcattatctgatattaaaggtaagcttgtatatgctggcagaaagtgggtttattttgatgatgatatcaaggatatgaccgttgatgataatggtgattatgatgccgatggtggtttgacttgtgccttaaaaacgcctgaacaatggggacaaattaacgataataatgattgtagtacaaccattaatgtctataaaaacggtacaacaacctcaggcgaggaggattacgaccgtttggcacgcaacccaacttacgcacccagagtaccgcccagccgcttgggcattcgttggcaaggacattttggcgaccattggtctgccaatgcagaatttaaccatgtgtttgcacaaaataaagttgccacctcaacggttgccattaaacctcaattcaagcagccagaaggttgccaacgccatgagagtcattgccgaatcagcgactatggcagtgataacaaccctttgatgatgcagccaagatatatcacagaaaacaaaacggcagggtataatttgctcaatgttggcttagattataacaatgcatatcgtaatgttgattatacgctgtcaattcgtgcgaataatttacttaatgaacaaatctacattcacaactcatttttgccgtttgtaccgcagatggggcgtaatctgactttaggtttgacggctaaattt

SEQ ID NO: 865 - DNA, 594 bp, Artificial Sequence
  Construct 6: MCRH1493-1 nt
aatgttttggttaataacggttattatgttcaagccgatcttggttattcaaatctagaagcaaaatataacgacaatcgacccaacgacaataaacttgaagataaaggtttgggctatggtatcagctttggtaaagataccgacttggctcgctatgccttagattatacaaattatggtaagattaattcttcttacacttatcaaccacaaacgaacacgaacacgagtatcacctcttcaggcgagcttaaggcacagtctttgggtctttcagccatttatgattttgatacagtgtcaggttttacgccgtatgcaggtgctcgtgtgggcattaaccaaataaaaagcactgtttcgacagtgacaacaacgacctctgcccaatcaagaactacccacagtcaaaaacaagaaaataaggttggctttggtgtgctggctggggcgcaatatgccatcaacccacagcttagcgttgatgctggcgttgagtataattatctgggtaagtatgataaattggatacagacagcaagcttaaggctcatcaatatggtgtgaaagtgggtcttcgccataacttt

SEQ ID NO: 866 - DNA, 276 bp, Artificial Sequence
  Construct 7: MCRH1546-1 nt
tcaaaaccacaagaacaagctgaagcagcagctgacgcaactgttgttgccaacgaagcatctgctgctatgactggtgatgcagctgaagctgcggctgaagcagcagctgacgcaactgctgctgccaacgaagcatctgctgctgctatgactggtgatgctatgactggtgatgctgctgccactgaagctgctcacgctgctgctgaccaagctcaagctaatgctgaagctgctcaagctgctgcaactgaagcaaccgaacaagccaaa

SEQ ID NO: 867 - DNA, 729 bp, Artificial Sequence
  Construct 8: MCRH1701-1 nt
accaaagaagaaaccagcacccaaacaacagcacccgctcagccaagccaaaaaagcattgtgatcgcaactgaagccgcctacccaccatttaatgacacggatgccagcggtcagattatcggttttgatgtggatgtgatgaatgccttatgtgccgaaatgcacgctcactgtcagataattgctcaggattgggatggcttaatcccaagcttattggcaggcaaatatgacgccatcatcgcaggcatgtccatcaccccagagcgtcaagcacaagtagatttttcggactcttatttttcaaatacgatcgtttggcttgccaaaagtgatggcagctttgatcccaataatatcaccaatcaaacccttgccagtcagcgtggtactactggtgctgcctatatcaccgaaaaatatgatggtaaagatggcaatcgtgttcagctgcatgacacctacaccaatgcttatttggacacaaaagcaggacgcaatcatgcagtcatggctgaaaaagtatcggctattgactggctaaagcaagagggtaatggtgagtttggcttaatcggcgaagagattgataataacgatcacttgggtatcgccgtacgcaaaggcgacagcctaaaagctgagtttgatgcagctttagcaaaaatcaaagaaagcggtaaattggcagaaattgaaaaagctcactttcaatcagatactttt

SEQ ID NO: 868 - DNA, 729 bp, Artificial Sequence
  Construct 8m: MCRH1701-1 nt
accaaagaagaaaccagcacccaaacaacagcacccgctcagccaagccaaaaaagcattgtgatcgcaactgaagccgcctacccaccatttaatgacacggatgccagcggtcagattatcggttttgatgtggatgtgatgaatgccttatgtgccgaaatgcacgctcactgtcagataattgctcaggattgggatggcttaatcccaagcttattggcaggcaaatatgacgccatcatcgcaggcatgtccatcaccccagagcgtcaagcacaagtagatttttcggactcttatttttcaaatacgatcgtttggcttgccaaaagtgatggcagctttgatcccaataatatcaccaatcaaacccttgccagtcagcgtggtactactggtgctgcctatatcaccgaaaaatatgatggtaaagatggcaatcgtgttcagctgcatgacacctacaccaatgcttatttggacacaaaagcaggacgcaatcatgcagtcatggctgaaaaagtatcggctattgactggctaaagcaagagggtaatggtgagtttggcttaatcggcgaagagattgataataacgatcacttgggtatcgccgtacgcaaaggcgacagcctaaaagctgagtttgatgcagctttagcaaaaatcaaagaaagcggtaaattggcagaaattgaaaaagctcactttcaatcagatcctttt

SEQ ID NO: 869 - DNA, 396 bp, Artificial Sequence
  Construct 9: MCRH2506-1 nt
aacagctcagggactgccaccgccaataatccacaggttgaagaccgtgccaaactcatgaaagattggcgtcatgccaatgaaggtatgaaggcaatgattgaagacccaagtcgctttgatgccatcacctttaaagagcgagctgattttattgctgataccaatgccaccatgtgggtacactttgaaggagaaatggctcaaggtggtcatgctaaagatgagatatggacagaccctgaaggctttcaaaccaaaatcgaagcgtttaccagctcaattaatgcacttgccttggcagcatcagaagctgcctcggcggctgatgttgaagcaagctatggtgaaatggccagccagtgtggttcttgccataaggcttataagaaaaaa

SEQ ID NO: 870 - DNA, 636 bp, Artificial Sequence
  Construct 10: MCRH2669-1 nt
tctggtggtcatggttgtggtgaatataccgaagctgatggtacggttgttaccttagaatgtagcaaagctccaattgatttaaccaacaaaggctcactgcaacgcggtgctgccatgtttatgaattattgtgcaggttgccactcagcccaatatgtgcgtcattcaagattggctcaagatttaaacatcccacctgaattggttgaaaaatatttgcttgtcacaggtgatgccattggtgaccatattaatgcagggattgacccagaactacaaagccaatggtttggtgctgcaccgcctgatttgtctttagagactcgcctgcgtggtgatgactgggtctatacttatttactgtcattctatgaagacccaagccgtccttggggggctaataacctagtacttgcaaatgcagccatgcctcatgttcttcataatctacaagaagaacttggcaaagaagaatatgaagcgcgtgttggcgatttggtcaacttcatggcatggatggctgaacctgttcgccatgaccgtaagatttatggtgcttttgttattttattcttattaattttattaattccagtttatctgctcaataaagaattctggaaagatgtcaaa

SEQ ID NO: 871 - DNA, 1968 bp, Artificial Sequence
  Construct 11: MCRH2844-1 nt
agcaataatagcacgacagcatcacaaggtggcggtgatttaaccacctataaatatgtgttttcaggtgacccaaaatctttagactatatcttagccaaccaagctgttactgccgatgttaccactcagatggttgatggtttgctagaaaatgatgaatatggcaaccttgtcccttctttggcgactgattggagcgtttcagaagatggattaacttatacctacaccttgcgtgatggggtattttggtatacctcagatggcgaagaatatgcgcccgttactgcccatgactttgtgacaggtctaaaacatgccgttgacggtaaatctgatgcactttatgtggttgaagattctgtaaaaaacctaaaagcctataaagaaggtaaagtgaattgggaagaggttggcgttaaggctttagatgataaaactgtacaatacacgctaaaccaaccagaatcatattggaattctaaagtgacctatagcgtcctattccctgtgaatgctaagtttttacaatctaaaggtaaagattttggtgctttagatccttcatctattttggttaatggtgcttactttttaagtgcctatgcatcaaaatctttgatggaatttactaaaaatgataattattgggatgctgacaatgttcatgtacagtctgtcaagctaacctataccgatggctcagatcctggttcgtattatcgtaactttgataaaggcgagtttagcgttgcacgcttatatccaaatgacccaacttaccaagctgcccgtgaaaaatatcaagataacatcgtttatggcttgatagatggtacaacttattatttcacctttaacctaaatcgttctgcttttgccaatagcacaaaaacgacagagcaacaagaatctgccaaaaaggcaatgctgaacaaagatttccgtcaagcggttatgtttgcacttgatcgtgcagcttatcaagcacaaactgtcggtgaggaagccaaaaccaaggccttgcgtaatatgctggtaccgccaacttttgtgtctgccgatggtgaagactttgggcaaatggtgaaaaaagacttggtaggctatggtgcagaatggcaagatgtcgatttgtcagatagccaagatggtctatacaatccacaaaaagccaaagaagagtttgctaaagccagacaaactttagaagctcaaggcgtgactttccctatctatttggattttccaattgaccaagcagattcgaacagagttcagcaagctcaatcattcaagcaatcggttgaggcctcattgggtcaagaaaatatcatcatcaatgtcattgaaaccgagacctcaacttatgagtctcaaggctactatgctgaatcgccagagcagcaagattatgatattatgatggcaggttggggcccggattatcaagatccacgcacctatttggatatcatgagtcctattgatggtgccatgctacaaaaaacaggtatccacagaggtggcgataaagctttagttaaacaagttggtttggatacttatcaaacactgcttaatcaggcatcggtcatttctaatgataacagtgcgcgttataatgcctatgccaaagcacaggcattactgcttgacagtgctttacaaatcccaatggttgctattggtggtgtaccaagagtttctaaaggcgtaccatttagcggatcattttcttgggcgggcaataaaggcggtagctggtataagagattaaaactacaagcacagcctgtcacgactgagcaatatgagaaagcctatcaagcatggcaaagtgaaaaatcggcttctaatgccaaatatgctgacagccttgttaatcgtgtcaaaaaatcagatacagcagcaagcgatgctgcagcaactgatgctgcaaccacggatacgacaacagcgaat

SEQ ID NO: 872 - DNA, 1725 bp, Artificial Sequence
  Construct 12: MCRH3040-1 nt
caacaaaataactctgcaaacatcatcaatcatatacccgctcatgacaccgccatcaatcaagcaaaggcaggcaatccacctgttttgctaacacctgagcagatacaagcacgccttaatgctgctggactgaatgctaagccccaatcacaagctttggatgttgtcaattttgatgatcaatcgccgatatctcgtatcggtgagcaatcaccccctttgggtttggatatgtcggtcatcgaagaaaccacaccgctaagcttggaggaattatttgctcaagaatctactgagatgggaatcaatccaaatgattatattccagaatatcaaggcgagcaacctaatagtgaggtggttgtaccaccgacattagaacctgaaaaaccaggtttgatcaagcgtctttatgcacgcctatttaatgatggtgtcaataaggtgcctaggcttaaggcaaaattttatcaatcatcgcaatcaggcgaaaccagtgcgattgggtcatcgcatcaaaaaacagagccttatgcaaatatcaaagcagcacttgaagacatcacccaagagtcagcgatggatttgaatggctctatcccacgcctaaggcaaactgctttggtggcagcgcgtgctgtcggttattatgatattgatttatcaatcataagaaatagcatcggagaggtggatgtcatcatccatgatttaggtgaacctgtttatattgattatcgagcggtggaggtacgaggtgaaggtgctgatgataaagcatttactaccgtggcggatgaggtgccattgctgatcggcgatgtctttcatcatggcaagtacgaaaccaaaaaaaatctcatcgaaaatgccagtgctgaacatggatattttgatgggcgttggctggatcgttcagttgatgtaattttgccagataataccgctgatgtcagcttaatttatgatacaggtacgcagtatcgctttgatgaggtggtattttttaccattgatcctaaaaccaatcaattgacaaccgatccagataagctgccagttaaacgagaattacttgagcagttactcaccgttaacatgggagaggcttacaatttacaggcggtgcgtgcactttcaaatgatttgattgccacacggtattttaatatggtgaataccgagattgtctttccagagcgtgaacagatccaaaacgaccaagtgagctttgagcagtcttcaagtagccgtactgaaccagcacaagttgatgaaagcacacttgaacctgtcattgaaaccgttgagctaacggatgggatattaatggatatttcgcccatcgaatttagtgcatctaatctgattcaagacaagctaaatttggtggctgccaaggctcgccatttatatgacatgcctgatgatagggtgcttgccatcaatcatgatgatggcgtaaatcgctctattttgggcagaatcagcgatgccgtatctgccgttgcacgcgctattttacctgatgaatctgaaaatgaggtaatagatttgcccgagcgtaccgcattggctaatcgcaagacccctgccgatgtctatcaaagtaaaaaagtgccgctatatgtctttgtggcgagtgataaaccacgagatggtcaaattggtttgggctggggatcggacacaggtacccgcctagtcacaaaatttgagcat

SEQ ID NO: 873 - DNA, 1065 bp, Artificial Sequence
  Construct 13: MCRH3040-2 nt
gtctatcaaagtaaaaaagtgccgctatatgtctttgtggcgagtgataaaccacgagatggtcaaattggtttgggctggggatcggacacaggtacccgcctagtcacaaaatttgagcataatttgattaatcgtgatggctatcaagcaggcgctgagctaagactgtctgaggataaaaaaggggtcaagttatatgccaccaaaccgcttagccaccctctaaatgatcagctaagagcaactttgggttatcaacaagaagtttttggtcactctaccaatggttttgatttatccacacgcaccctagagcatgagattagccgcagtattatccaaaatggtggctggaatcgtacttattcattgcgttatcgtcttgataagcttaaaacccaagcaccccctgaaacatggcaggatttaccagtggattttgtcaatggtaagccaagccaagaggcgttattggcaggtgttgctgtgcataaaacggttgcagataatttggttaatccgatgcgtggctatcgtcagcgatattctttagaggttggctcaagcggtttggtatcggatgctaatatggctattgctcgagctggtattagtggcgtgtatagttttggggataatgcttatggcagcaatcgtgcccatcagatgactggtggcatacaagtaggatacatttggtcggataattttaatcatgtgccatatcgtttgcgtttttttgctggtggcgaccaaagtattcgtggatatgcacatgacagtttatcacctatatcagataagggttatctgacaggcggtcaagtattggcggttggtacagctgaatataattatgaatttatgaaagatttgcgtttggcggtttttggtgatattggtaatgcttatgataaaggctttactaatgataccaaaattggtgcaggtgtcggtgttcgctgggcatcacctgtcggtcaagttcgtgttgatgtggcaactggtgtcaaagaagagggcaatcccattaagctgcatttttttattggcacaccattt

SEQ ID NO: 874 - DNA, 1080 bp, Artificial Sequence
  Construct 14: MCRH3709-1 nt
ttttcggttgataacagtcagcagcgtataacagtacagcccacttatgtgcaacctgctcaggtaatcacctctcaatctgtgtatgttgaaccgacagcccaagtaaccacaacgacaaatgtgagcgtgcaggcagtaccacaagcaccccaagagcatgtggtgtcacaagaaggctatgcacaaacccaactgaatattcaaccacaagtcatctcaagcaccaaaacccaaacaaccgcttacaccaccacctcaaacgcccaaacagccatcttaaatgaccaaaacagctatacaaatagtttttatgcgttgcccatcagtacacgatcggcagcggttttggtctatgatttacaagatggcaagctcatttatggtaagaatgcagatgttcaacgctcaatagcttctatcagtaaagtcatgaccgccatggtcattttggatgctgagcttgatatgcgtgaagaaattactttgattgcctctgacttgattggtgcaaaacaagcaagcacacgcctaaaagctggtgaccgcatgacacgatctgagtttactttgatgatgctcatgcgttctgaaaaccctgctgccaaagcattggcacgcacttaccccggtggatatgatgcttttattgttgcaatgaaccaaaaggcgtatgatttgggcatgtatcaaacgaaatttagtgattcttcaggtttagatccacgcaatatgtcatcagccaatgatttattaatcatgatgaaagcggtcaatagtagtccacgctatcacagtatccgtaatttttccacagcaccacattatgatttttatatcgccaattatggcagtggcgaccgtatctataaaggcaataataccaatcgcctagtacgagaaggtgcttacccaattggtgtccaaaaaacaggctatattcgtgaagctggttatagtgttgtgatggaaactaacattaacaatcgcccagccattgttgttttattgggtgcatcaaacagtgcaaaccgatggagcgatgctgaaaccattttaactgaattggcttatcgccag

SEQ ID NO: 875 - DNA, 1038 bp, Artificial Sequence
  Construct 15: MCRH3729-1 nt
agtagcacaggcacacctgctaaacctgttagccaaaccccaaaacccatacctcaagctaagcccagtcagcagattaatatctcgtcaggtaatactaatttgggtaatactaagactggtgcagatgtagatgttttggatgttcagatgcttgatgcattagaagcgttattacaagcgactgatatgagcatggtggagggtgatgaactggcgattcaacgctatggtaatttatgggatcgggttcgccgtggttatcgcattaatgagatgaccaatgcacgcattgaagctcaaaaatcatggttttatactcgccaaacctatttagatcgcttgactgcgcgtgcttctcgctacctacatcatacggtcgccgaagctgaacgccgtggcattccctctgaattggcacttttgccaatcattgaaagctcatatgacccaacagcgaccagtaatgccgccgccgctggtctttggcaatttattcctagcacaggtcgaatttatggcttgaaccaaagtgctacctatgatggtcgccgtgatgtcattgaatcaacgcgtgccgcttatgactttttaacaagtttgtataaccaatttggttcttgggagctggctttggcggcttataatgcagggcctgggcgagtttcgcgcgccatcaaagccaaccaagatcaaggattgccaacagattattggtcgcttaagctaccgactgaaaccatgaactatgtaccaagattcttagcagtcgctcaaattgtgaggtcgccaaatacttatggcatcaatttacccgccatcgctaaccacagtcattttagaacagtgccagtgaattatggtgtcagcctatctgaggttgccacagtgacaggtttgtcagtcagcgagcttcgtttattaaatcctgcactgttaaattttaccgtggatgagattggtccaaatcgtatcgtcattcctgacagtttgccgaaccaaatcgataatcagctggcttctttaaaaggctatgga

SEQ ID NO: 876 - DNA, 366 bp, Artificial Sequence
  Construct 16: MCRH3759-1 nt
aaaactgctgcccccaaagcgtctgaagcacctgaagtatcgttaacccaagaagagcaaatggctatagatttttgtgatttttcagcgtatggtgtgatgcatattgctggcgatcatcaaggtggtgcaacaaaatctgaggcactaaccaaccatgataagcgtatggctgagctgaaggatctcatcgaccttgacccagagaccgccacgatgcttgataagtattggaaaggtgctattgatagaatattccaagaatcggttcaaaaaaccgacgccgaaaaacaagcgtttgtgatgggtgtgggcgagtcatctttttattcttgccttgatcaagtgcttaaaactcccaaaaac

SEQ ID NO: 877 - DNA, 1353 bp, Artificial Sequence
  Construct 17: MCRH3966-1 nt
caaagtcttgaccatacccaaaacgctatctcaaccacaaaaaccccaagcacccaagcagaacatcacgatatttatacccaaaccttaaaaaatggtctaaaggtcatcatcaaacaagacagccgagcgcccattgtgatgacccaagtttggtatgatgtgggttcaagtgatgagcctattggaaaaggtggtatttcacattttttagaacacatgatgtttaaagatgccaaaggtgtcagtcatgacgactatcaacgcctcattagtcattttgggggtgagttaaatgcctttaccagtgatgaatttacggcctattatgaaagcctgcctgccaatcaatttccattggcactacaaatagaagccaatcgcatgaataacctcatcttaaccgctgaggaggttgccaccgaaaaacaggtaatcaaagaagaacgccgcctaaccacagacgacaaacccaccgccaaagctcatgaagagtttttggcaattgccctaccaaattctcccaaaggtctccccatcattggtagcatgccagagattgaagcaattacggtaacagacttgcaaaattggtatgatcaatggtacgcaccaaacaatgcaacattagtactggttggcgacatcgaccccaaaaccgccctgccttggatcgaaaaatattttggcactctaaaaccatcatcattaccaaaacgcaccccacttagccagccaagtcatcgtggctatacgcaggccaatagctatcaaaatgttaaagtaccaagcttaatcatggggtttaatgtacctactttaggtagtcgtactattaaaaatcataccaaagaagctcatgcattatcactgcttagcgatattgctgatggcggcttatcagcacgttttgagcgtcatctgattcgcaaattacaaatactaaatagcgtttctattcgctataatatgctctcaaaaagtgatgatttatttaccattattgccacacctcgtgagggtgtcagcttggcagatgctgaagctgccatattagcagagcttaatgccatcaccaacgatcaaatcacggatgatgaactggcccgtagtcgtgcaggcttgttatcatctttggtgtttgccaatgatagtatcgccaaacaagcctctaatttaggtgctttgtctgcgttggggttacctttagatactttagatactctaccaaaagcattggacaaagtcagtaaatcagacatccaagctgtgggtaaaaaatatctgaccaaagacaatctaaccacggtttatgtattgcccaaaaatacacaatcgccctcagacactcat

SEQ ID NO: 878 - DNA, 438 bp, Artificial Sequence
  Construct 18: MCRH4526-1 nt
gaggatacccttaaggatgtgccaaaagcaacggatttttctgtcatcttagatgaggttgttgtaacggcgaccaacggcaccaaaaaatcccaaaaaccctttaccaaagcatcggccaccagcgtgcgagaaaatgtatttaatgccagtgagaatattgatgccattgtgcgcagtgtgccaggggcgtttactcagcaggataaatcctctgggctggtatcattaaatgtacgaggcgatagtggatttgggcgtgccaatagcatggttgatggtgtaacccaaaccttttacagcacctcaaccgatgctgggcgtgggggtggcacctcacagtttggtgcggtgattgaccaaaatttcattgcaggcgttgaattaaacaaaggcagttttaatggcaaaggtggtatcaacaccttaacaggttcg

SEQ ID NO: 879 - DNA, 2340 bp, Artificial Sequence
  Construct 19: MCRH4526-2 nt
ggcaaaggtggtatcaacaccttaacaggttcggccaattttcgtacgctaaatgctgatgatgtgattaaagatgacaaaaattttggcttcattgccaagggtttgaccggtaaaaatgcgacggataaaaattttatgctggcagctggcggacgtggatggcttgataatggcagtatcagtgctttatatgcttatagccacaaagacattagccaaaattataaagttggcggtggcgggacgcacattggcaatgttggtgatgatttgctacttagtaaacaaaaacaagtttttgccaaagagcatgcactcacttacaatgaagccagccgttcctggcaaaaagatttgaccaaattagataaagaaacaggcaagcctttatgggacagaaaatatcaatttggcggtaagtgctatgggctgggctgtattgatacaaaagagaagtttgatgaatatgttgctgacaaacagcagcagtggcaaaagcatggtgcaaaagagtacagcatcacccccattgatatcaccgccctaaaccaaacctcaaaaagccatttggcaaaaattcgttacaacaatgacaccagcgatgttggtctacaactgcgtaaaatggacaccacgataggcagtcgccgtatcagcaatgataattatcaacttgatgctgcttacaacccaaatgagatcattgatttaaaagtgttggcagcccataatgtgggcgtacaaaaataccccaaaggttcaacttttacaggctggaaattggataaagactttgaaaccaaaaacactgccaatctttttgacctgaacaacactcacacctttaatctgccaaagcaaatggatttgaccacaaccgttgggctgaacatattgcataatgaatattcaaaaaatcgcttcccagatgagcttgggctattttataccaatgatttattatgtggcggcggttatgatgcctgtggtggtcgttttcaggggacaagcagcacactgccaaaaaaatcggtgattgtacagccctcaggcaaacagcgttttcattctatttatttggacacatcattacaaaaagacaaatatcagttagattatagcgttaatgccagtcagtaccgttttagtggtgagcatgccagttattatagcagccaaaaagagtttcaagataagtttggtgaagattcgcaaatttataaacagcactgctcgccaagttgtgatgtgtatgagcctttggtaaccacttctggtaaaaaacacgccatcaaccattctgttactttaagtgccaaatatgacacaggttttatgccttttgtcagctttgcacgcacgcacagaatgcccaacattcaagaaatgttcttttctcaaattggtgatgttggcgtcaatactgcattaaaaccagagcaagccaatacatatcagttgggttttaatgtttttaaacgcaatctattgacagacaacgatactttggggctaaaagtagtgggttatcaaagccgtattaacaattacattcataatgtttatggtaaatggtatgacacaaaaaatccacccagttgggtgaccagtggtgcattaaaaggcgataccatacagcatcgcaactggcaaatgcctgtgcataaacagggcttagagcttgaaatcaactatgatgctgggcgatattttaccaatttgtcttatgccagacaaaagaccgaccagccaaccaattatagcgatgccagcgagtccccactaaatagctcaaaagaagaccaattaacccaaggctatgggctaagcaaagtgtcaatgttgcccaaagattatggtcgttttgaacttggtgtgcgtgcatttgacaacaaactcaccatgggcagtgcggtgcgttattatggacaaagcccacgagcgaccattgaacccagatacattgatggcacgcatggtggcaatacatcgcattcagatgataaaggtgctcatgtcatcaagcaaattgagatgctaaaaagacagcctttggtgcatgatttttatgttgcttatgagccaataaaagatttggtgatgcgtcttgatgtgcaaaatgcgtttgataaactgtatattgaccccttagatgccaacaatgatgccgccactcagcgttattatcattcatattataatgatgcagacgaaggcgcaccttgtgcagcggggcagttgtgcaagcctgatgcaaaatacggcggtactactcgctcggtattgaccaattttgccaaagggcgttctttattattttcaatgacttataagtgg

SEQ ID NO: 880 - DNA, 1407 bp, Artificial Sequence
  Construct 20: MCRH4706-1 nt
gatgatggtcgcaccgacaatcaagagccaatcaatcaagaaatagccacccttgaacccatcattaaccatgctcagcctgagttattgtcccatggtgcattaacaccaaaaacagaaccaatactggcacaaacaccaaatcctgccgaagatacgctcatcgccgatgaggcgttactgcttgataaccctgatttgctcaatcacgccctaaattctgctgtcatgaccaaccatatggcaggcgttcacgcattattgcccatttatcaaaaactgcccaaagaccatcaaaatggcattttacttgggtatgccaatgccttggctgctttggataagggcaacgccaaaaaagccattgatgagctgcgtcgcatcatcgccatcatgcctgaatataatgtggtgcgttttcatctggcaagggcattatttatggacaaacaaaatgaagccgcccttgaccagtttaataaattacatgctgataacttaccagaggaggtgcggcaggttgttgggcagtacagacaagcgttaaaacaacgagattcatggacatggcaattaggcatgaatctggccaaagaagacaacatcaatcaaacccccaaaaacaccacgcaaggtcaatggacttttgacaaacccattgatgccatcaccctaagctaccaattgggggcggataagaagtggtctttgcccaaaggggcatatgtgggagcgaacgcccaaatctatggcaaacatcatcaaaatcacaaaaaatacaatgaccattggggcagactgggggcaaatttgggctttgctgatgccaaaaaagaccttagcattgagacctatggtgaaaaaagattttatgggcatgagcgttataccgacaccatcggcatacgcatgtcagctgattatagaatcaacccaaaatttcaaagcctaaacgccatagacatatcacgcctaaccaaccatcggacgcctagggctgacagtaataacactttatacagcacctcattgatttattacccaaatgccacacgctattatcttttgggggcagacttttatgatgaaaaagtgccacaagacccatccgacagttatcaacgccgtggcatacgcacagcgtgggggcaagaatgggcgggcggtctttcaagccgtacccaaatcagcatcaacaaacgccattaccaaggggcaaacctaaccagcggtggacaaattcgccatgataaacagatgcaagcgtctttatcactttggcacagagacattcacaaatggggcatcacgccacggctgaccatcagcacaaacatcaataaaagcaatgacatcaaggcaaattatcacaaaaatcaaatgtttgttgagtttagtcgcattttt

SEQ ID NO: 881 - DNA, 225 bp, Artificial Sequence
  Construct 21: MCRH4712-1 nt
aacgaccgtattaaagcacaagcttatggcgacagcaactttgcccaaaatcgtcaaaaagccattcaaatgcttgctgctcgtggctatcaagtcggcgatatagaagttgatgactttttaggcaagcctgtctttgaagtagaagcctataaaaacggtgctgagtatgacatcgttcttgaatacccatcacttaaaatcatcaaagagcagcgtgattac

SEQ ID NO: 882 - DNA, 1593 bp, Artificial Sequence
  Construct 22: MCRH4730-1 nt
ggtaaacccagcaaaattcatacaccatccataacgcaccaaaatatgttacctagcaacaccttggcacaattatccgccctgccccagcttacccaaggtttgggcgacacaggcaaaagcgtcattgacccaaataagccaactttggtgaagttttgggcaagctggtgccctttgtgtttagccaccttacaagaaacgcatgattggcgtgatgaccctaatttggcaggctttaacatcattaccgttgccagccccactcacttaaacgaaaaaaatacccaagattttaccgactggtatcaagtgctacaagcagattatccaaatctgcccgtgctcattgacagtagcggccaactcattaaagaacttggtgtacaggtctaccccagctgggcaatcttggacaaaaatgggcaacttgtgtatcttaataaaggcaatcttagctttgagcaagtgtcttatttggcaaaaaatccacaagagctagaccagcttaaaacccaaggtggtcagaccgccatgcccactaaaaataaagatggtgtatattataacgatcaaggccagcctttaaataccaaaaccatccatctggcgggcggctgtttttggggtgtagaagcttactttgagcgtatcgatggcgtggtagatgctgtcagtggttatgccaatggcaatgaaacaatcgccaatccaagctatgagcaagtcattgcaggctcaggacacgccgagaccgtcaaagtagtttatgatgccgataaggtggatttggacactctattacaatattattttaggattgttgacccaaccagcgtcaataaacaaggtcatgaccgtggcatacagtatcgcacaggcgtttattataccgatccaagcgacaaagcgattattgagaatgctttaaatgaattacaacaaaaatataaagcacccatcgtcgtcgaaaatctacctctaaggcatttttcccctgctgaagagtatcaccaagattatctcaccaaaaacccaaatggctactgtcatgtggatttaagtcttgccaatgataaaatcacgagtaaagctcccaccctaccaaaggcaagcaccgttcaagaggcccttgacccaagacgctaccaagcttttactaaagataatttaaaacaaagcttaaccaaggctcaatatgatatcacccaaaacgcaggcacggagcgggcatttagccatgcctacgaccatctgtttgatgatgggctgtatgtagacattgtcagcggtgagccactgtttttatctaccgataaatacaactcaggctgtggctggccaagctttaccaagccgattgatccacaagtcatcagcgagcataccgacacaagctataatatgatacgcaccgaggtacgctcacgcattgccaattcacatttggggcatgtgttccctgatggtccaaaggcacggggcggactgcgttactgcatcaatggcgatgcattaaaattcatccccaaagcggacatggaaaaacaaggctacggggcgttattgccactcattaagcctgcccaacct

SEQ ID NO: 883 - DNA, 834 bp, Artificial Sequence
  Construct 23: MCRH4740-1 nt
caaaactctatctcggtttatattgcacctcaaggttctgcccatgcgactgtggcatcagcttatacttcatcaagcagcaaaaacgctgtagagcctggttttttgactaagctgcaaaccgataccatcaattcacaaaaattcaccaaattaagtaacgagtctcaaacggttggccgtttgtatcattataatgagcctacgaccaatttttctgcaaattttgttgcaaacagttatgcaagctactcaggtgattattctgagcgtagtacatacgaccatctcattcgagaatctgcggcaagacatggcgtagatcccgccttaattaaggcggtcatccataccgaatcaagctttaaccccaatgtgcgttcacgcatgggcgccatgggtcttatgcagctgatgccaggtacggctcgtgatatgggtgtatataatgcatgggatcctgcccaaaacatcgaaggcggtaccaagtatttggcgtatttacaacaccaatttagcaatccaaatcatgtgattgccgcttataatgcaggccctggtaatgtcaaaaaatatggcggtattcctccatttcgtgaaaccaaaaattatgtgattaaggtaaatgaccgctacaacaacatttatcgtatggatgcggcattgtatcaaggctatgatgcgaatcgtaccatgcttgcgatgaatagcacgccagtagctcaggtaaagacaacaacaacttcctacgctcagccaatcacacaaagggcaccaagcaatcctgtgattaatcgtgacgcatctgcacatatttatttttcaaacaatgaa

SEQ ID NO: 884 - DNA, 657 bp, Artificial Sequence
  Construct 24: MCRH5107-1 nt
tctgagtctgtatctgaagatgatttgacagcactgattatcagtgctaatcgtgcgtcccaaagtaatccaaattcaccactggcagaatctgtgcgtgaatttgagcaggctattaatcccgccaatcaagcagataccaaacctcaatcaacccccatcaatataccaacatctcacgcacaaagtatcagccatgacaagctgattttaaatacacctgtggttgatgttgccaaaatattgacaccatcagaatatctacacttaaccgaacagctccataagatttatcaagataatttggctcaagctgctttggtgattgttccaagtactgatggtatcgatatttttgattatgcacttgccgtcgctgagcgatggcagttaggtcaagcagatacagatgatggtttattaattactgttgcggtgaatgaccgaaagatatatatcctaacaggttatggacttgagggtgtgctgcctgatgcagcattaagtcgtattattcgtgatgatatcacacctgcttttaaatcaggcaattatgctcaagggctgtcagcagggattgcacgcattgatgaacgcctaagagctgatcctgaaagtttggctcgtgctgacgctcagactgatgattctgtggat

SEQ ID NO: 885 - DNA, 744 bp, Artificial Sequence
  Construct 25: MCRH5471-1 nt
tcccgctttgagatgccgctacagatttatactgccgacaacaaactgatcggacaatatggtaatcgctactctttgcctgtcacctttgacgaaattcctgagcgtatgattcaggcatttttggcggcagaagacgatactttttttgaacacagtggcatcagtgtcaaaggcatgggacgagcattgaccgaagttatcagtgataatgacgctcaaactggtggttcaaccattaccatgcaagtggcaaaaaactattttttaagccctgagcgtaccattaatcgtaagctgaccgaactttttatcgcccgcaaaattgaaaatgaactcacaaaaaatgaaattttaacgctatatgttaataaaatttatttaggtgaaggcacttatggtattcaagctgcagcacgccgctattattccaaaaatctagaaagcttgaccattgcccaaatggcgatgatcgcaggcttaccaaaagccccttcggcctacaatcctgtcgttaatcctgaacgggctatggagcgacgcaactggattatcggacgcatgcaccaagaaggctttattaccgcttctgaaaaagatgccgccattgctgaaccaatggggctaaatatctatcaagaaaaacttgatctaaatatgccttatgttgcagagatggtacgctccactttggttgaccgctatggcgaggcggtgatggattcaggttggcgtgttcaaacc

SEQ ID NO: 886 - DNA, 1482 bp, Artificial Sequence
  Construct 26: MCRH5471-2 nt
gcggtgatggattcaggttggcgtgttcaaaccacaatcaatagtagctcacaacttgcggccaatgctgccttagtggggggtttgcgtgattatgaccgtcgtcatggttggcgaggtgttgaagcagaatcagggtcgcttgaaggtcgtaaaaattttgatcatatttatcctgccaaagttactaaggttcataaccaaagctttgaagctaagcttcaatctggagaaaccgtaaccatcggttggtcaggtatgaattgggcgcgtcgctactatgatgctaaccgtgtcggtggtggctacagtaatgctcatcagatggtcaaggttggtaatattgtgcgaatctctccgatcaatgaagcaaaaacagcttggcgtatggaatctattcccaaagttcaaggtgcattggtctctttagaccctgaaaatggtgctttgcgtgccgttgttggtggttttcattttaatcacagcaaatttaatcgtgccatccaaggctatcgccaaccaggatcgatcattaagccttttatttttgctgcagcacttgagtctggtcaatatacgccagatagcttaatctctgatgctgccattcgtgttggtaggtggcaaccaaaaaatgccgatggacgctacacaggcgatatgacactacgccgtgcacttactttatcacgcaataccccagccattcgcctgctgcgttcagcaggtgttgatgaatctcgccacctaatgaatgccatgggtggacttgagatagaacgcatgccgtctacattggcattggcattgggtgctgctgacgctacacctttacaaatggcaactggttttgctaccatcattaatggtggtcatcgtatccagccttattttatcgaaagaatctataattttgacaatgaaaccatctatcaagccaacccacagcaagcctgtgcactttgctttaatgaaaatctttcggcaactaatgccaaattgcttgaattatttgaagccaataaatcagagatttctacagacacgcctagcgcaccagctggcgataggctacaaccaagaagcgctccacaatatgtcgctgccactcaagcaccccgcgtgctttcccaccaaacggcttatgacatctccaatatgatgcgagaggttattactagcggtacgggtcgcagagctcgtgctttgggtcgtagtgatgttggtggtaagactggtaccactaaccttgccaaggatgcttggtttgcaggctttcatcctactaatgtggctgtggtttgggtgggttttgatacgccatcaactttaggaaatagtgagtacggtggcgtggctgcattaccaatttgggtgaattttatgagccatgaacttcgcaacacgccttcgcaatggatcagtcaagaagatcggtcaaaagccgtcaaagcgacccaacaagttattgatttgaaagat

SEQ ID NO: 887 - protein, 450 aa, Artificial Sequence
  Construct 1: MCRH0357-1 aa
NDSPNLSNSAFQQCLSTLKNSSTFRSVSGVTFEKYRPSQPDPSVIRSLNYQPEFKKDVWDYLASLVDSERVQDGIRAKHEQADVLRRIESRYGVKPEHVLGVWGVESNFGQTLGKKNLFDSLATLSCFDRRQSYFRGEYANALKIVQNGDIRPEDMTGSWAGAFGQTQFMPSTFLELAVDFDGDGRKDLVNSKADALASTANFLVKRGYRLGEPWGYEVRLNGYNGSSGRRNKQSINHWRAQGITLPNGQPIPNNMASAGLLLPAGRQGPAFLVGKNFDTFYSYNASESYALAIAQLSDLVRDENTNTNFATPWPTDDPGIGRRESKEIQQALINAGYDIGAVDGIIGDNTRQAIMDYQRKVGVMPDGRAGQKFHRLITGRTASIQSAQTPAQSINTPTTQYHSVQPTVSTQANAARAVIVKPANTPPTTGTTYRRVINADGSSSWILVK

SEQ ID NO: 888 - protein, 171 aa, Artificial Sequence
  Construct 2: MCRH0391-1 aa
TNIQPSTQTPTTLPTADTPLKFAVTGKIGVVTTTPEGRQAGSAFYTWTQEDDRFAIELTGMLGIGATQIRYNGTTAALDSERTGTITADTPEALLLTATGWQAPISQLPHWILGRGAPDDSTAGYDHLGRLVSAANGAWHAQFDYDKTSLPSRLRITHTNQHSITMTVTHQ

SEQ ID NO: 889 - protein, 239 aa, Artificial Sequence
  Construct 3: MCRH0546-1 aa
KTDTNAMASIKGGTYRPLYLSEDSPMVTVGNFHIDKTPITNQQFAKFVANNPKWQKQNIAKLFAEPDYLAHWQKTSKGYYPNSADIDKPVVNVSWYAANAYCKAQGKRLPKIAEWEYVAQASTTRINGSQEKGYNQTILDWYTKSATMPLKRVAQSPANYWGVYDMHGLIWEWTQDFNSNLVSGESRADSTLNQTMFCGSGAAGAPDPSDYAAFMRYGFRSSLQSQFALKSLGFRCAKD

SEQ ID NO: 890 - protein, 140 aa, Artificial Sequence
  Construct 4: MCRH0759-1 aa
DNTKLGEEPTTTLKGVLVSSQTNQNTGFVSNDSKQSSDLTLSKDKLKYRSATLGNALSGELGIHSNPFGGGSSAPVVRGQEGVRLKILQNGTDVIDVSSISPDHVVATDTLLASKVELVRGADTLLYGLASPAGVINVVD

SEQ ID NO: 891 - protein, 760 aa, Artificial Sequence
  Construct 5: MCRH0759-2 aa
GVINVVDDRIPNRMPSGAIHDKIEGETMLRYNTNNHEKLATAGVSFGVGDRIAVRVEGLKREADDYQVPHFQADRMLDYVPGSANNSTVGMIGVSYIHDNGHIGASYSHRKDRYGIPGHIHCDSQREHFIKWHNITKSNYYLPIYPHLMEDSDIDDNPHTHCRHNHEDHIGEHNPTGVPINHEHHSPWIDMKTNRYDIRGEVYRPIQGLDKIKLSLTYADYYHDEKDAGNEQDPNNHKPSERDTTVDKGHASSIFTKKGVNGRLELYHTPTKRLSGVLGIGYQTQKSAAGEAYLPSYFQSEAEWQKAQSQNINQYRPYLLVPNTNKSLGIFGLEQLKLNQMTFKVAMRHERQKTPIEYDQHLLDHALQYFLSKAQLKAPDHPDLTTYKQHATSYAGSALWDITPNHRLSLTYSHNERIPSPMELYYQGGHLATSSFEHGNKNLVKEKSDNYELGFMHTADKVSYKASTYYSNFDNYIFNETVAKEGNLYIRRYNQTTAKFYGVEGSLTYQPNANHSVMFFGDMVQGKIGALSDIKGKLVYAGRKWVYFDDDIKDMTVDDNGDYDADGGLTCALKTPEQWGQINDNNDCSTTINVYKNGTTTSGEEDYDRLARNPTYAPRVPPSRLGIRWQGHFGDHWSANAEFNHVFAQNKVATSTVAIKPQFKQPEGCQRHESHCRISDYGSDNNPLMMQPRYITENKTAGYNLLNVGLDYNNAYRNVDYTLSIRANNLLNEQIYIHNSFLPFVPQMGRNLTLGLTAKF

SEQ ID NO: 892 - protein, 198 aa, Artificial Sequence
  Construct 6: MCRH1493-1 aa
NVLVNNGYYVQADLGYSNLEAKYNDNRPNDNKLEDKGLGYGISFGKDTDLARYALDYTNYGKINSSYTYQPQTNTNTSITSSGELKAQSLGLSAIYDFDTVSGFTPYAGARVGINQIKSTVSTVTTTTSAQSRTTHSQKQENKVGFGVLAGAQYAINPQLSVDAGVEYNYLGKYDKLDTDSKLKAHQYGVKVGLRHNF

SEQ ID NO: 893 - protein, 92 aa, Artificial Sequence
  Construct 7: MCRH1546-1 aa
SKPQEQAEAAADATVVANEASAAMTGDAAEAAAEAAADATAAANEASAAAMTGDAMTGDAAATEAAHAAADQAQANAEAAQAAATEATEQAK

SEQ ID NO: 894 - protein, 243 aa, Artificial Sequence
  Construct 8: MCRH1701-1 aa
TKEETSTQTTAPAQPSQKSIVIATEAAYPPFNDTDASGQIIGFDVDVMNALCAEMHAHCQIIAQDWDGLIPSLLAGKYDAIIAGMSITPERQAQVDFSDSYFSNTIVWLAKSDGSFDPNNITNQTLASQRGTTGAAYITEKYDGKDGNRVQLHDTYTNAYLDTKAGRNHAVMAEKVSAIDWLKQEGNGEFGLIGEEIDNNDHLGIAVRKGDSLKAEFDAALAKIKESGKLAEIEKAHFQSDTF

SEQ ID NO: 895 - protein, 243 aa, Artificial Sequence
  Construct 8m: MCRH1701-1 aa
TKEETSTQTTAPAQPSQKSIVIATEAAYPPFNDTDASGQIIGFDVDVMNALCAEMHAHCQIIAQDWDGLIPSLLAGKYDAIIAGMSITPERQAQVDFSDSYFSNTIVWLAKSDGSFDPNNITNQTLASQRGTTGAAYITEKYDGKDGNRVQLHDTYTNAYLDTKAGRNHAVMAEKVSAIDWLKQEGNGEFGLIGEEIDNNDHLGIAVRKGDSLKAEFDAALAKIKESGKLAEIEKAHFQSDPF

SEQ ID NO: 896 - protein, 132 aa, Artificial Sequence
  Construct 9: MCRH2506-1 aa
NSSGTATANNPQVEDRAKLMKDWRHANEGMKAMIEDPSRFDAITFKERADFIADTNATMWVHFEGEMAQGGHAKDEIWTDPEGFQTKIEAFTSSINALALAASEAASAADVEASYGEMASQCGSCHKAYKKK

SEQ ID NO: 897 - protein, 212 aa, Artificial Sequence
  Construct 10: MCRH2669-1 aa
SGGHGCGEYTEADGTVVTLECSKAPIDLTNKGSLQRGAAMFMNYCAGCHSAQYVRHSRLAQDLNIPPELVEKYLLVTGDAIGDHINAGIDPELQSQWFGAAPPDLSLETRLRGDDWVYTYLLSFYEDPSRPWGANNLVLANAAMPHVLHNLQEELGKEEYEARVGDLVNFMAWMAEPVRHDRKIYGAFVILFLLILLIPVYLLNKEFWKDVK

SEQ ID NO: 898 - protein, 656 aa, Artificial Sequence
  Construct 11: MCRH2844-1 aa
SNNSTTASQGGGDLTTYKYVFSGDPKSLDYILANQAVTADVTTQMVDGLLENDEYGNLVPSLATDWSVSEDGLTYTYTLRDGVFWYTSDGEEYAPVTAHDFVTGLKHAVDGKSDALYVVEDSVKNLKAYKEGKVNWEEVGVKALDDKTVQYTLNQPESYWNSKVTYSVLFPVNAKFLQSKGKDFGALDPSSILVNGAYFLSAYASKSLMEFTKNDNYWDADNVHVQSVKLTYTDGSDPGSYYRNFDKGEFSVARLYPNDPTYQAAREKYQDNIVYGLIDGTTYYFTFNLNRSAFANSTKTTEQQESAKKAMLNKDFRQAVMFALDRAAYQAQTVGEEAKTKALRNMLVPPTFVSADGEDFGQMVKKDLVGYGAEWQDVDLSDSQDGLYNPQKAKEEFAKARQTLEAQGVTFPIYLDFPIDQADSNRVQQAQSFKQSVEASLGQENIIINVIETETSTYESQGYYAESPEQQDYDIMMAGWGPDYQDPRTYLDIMSPIDGAMLQKTGIHRGGDKALVKQVGLDTYQTLLNQASVISNDNSARYNAYAKAQALLLDSALQIPMVAIGGVPRVSKGVPFSGSFSWAGNKGGSWYKRLKLQAQPVTTEQYEKAYQAWQSEKSASNAKYADSLVNRVKKSDTAASDAAATDAATTDTTTAN

SEQ ID NO: 899 - protein, 575 aa, Artificial Sequence
  Construct 12: MCRH3040-1 aa
QQNNSANIINHIPAHDTAINQAKAGNPPVLLTPEQIQARLNAAGLNAKPQSQALDVVNFDDQSPISRIGEQSPPLGLDMSVIEETTPLSLEELFAQESTEMGINPNDYIPEYQGEQPNSEVVVPPTLEPEKPGLIKRLYARLFNDGVNKVPRLKAKFYQSSQSGETSAIGSSHQKTEPYANIKAALEDITQESAMDLNGSIPRLRQTALVAARAVGYYDIDLSIIRNSIGEVDVIIHDLGEPVYIDYRAVEVRGEGADDKAFTTVADEVPLLIGDVFHHGKYETKKNLIENASAEHGYFDGRWLDRSVDVILPDNTADVSLIYDTGTQYRFDEVVFFTIDPKTNQLTTDPDKLPVKRELLEQLLTVNMGEAYNLQAVRALSNDLIATRYFNMVNTEIVFPEREQIQNDQVSFEQSSSSRTEPAQVDESTLEPVIETVELTDGILMDISPIEFSASNLIQDKLNLVAAKARHLYDMPDDRVLAINHDDGVNRSILGRISDAVSAVARAILPDESENEVIDLPERTALANRKTPADVYQSKKVPLYVFVASDKPRDGQIGLGWGSDTGTRLVTKFEH

SEQ ID NO: 900 - protein, 355 aa, Artificial Sequence
  Construct 13: MCRH3040-2 aa
VYQSKKVPLYVFVASDKPRDGQIGLGWGSDTGTRLVTKFEHNLINRDGYQAGAELRLSEDKKGVKLYATKPLSHPLNDQLRATLGYQQEVFGHSTNGFDLSTRTLEHEISRSIIQNGGWNRTYSLRYRLDKLKTQAPPETWQDLPVDFVNGKPSQEALLAGVAVHKTVADNLVNPMRGYRQRYSLEVGSSGLVSDANMAIARAGISGVYSFGDNAYGSNRAHQMTGGIQVGYIWSDNFNHVPYRLRFFAGGDQSIRGYAHDSLSPISDKGYLTGGQVLAVGTAEYNYEFMKDLRLAVFGDIGNAYDKGFTNDTKIGAGVGVRWASPVGQVRVDVATGVKEEGNPIKLHFFIGTPF

SEQ ID NO: 901 - protein, 360 aa, Artificial Sequence
  Construct 14: MCRH3709-1 aa
FSVDNSQQRITVQPTYVQPAQVITSQSVYVEPTAQVTTTTNVSVQAVPQAPQEHVVSQEGYAQTQLNIQPQVISSTKTQTTAYTTTSNAQTAILNDQNSYTNSFYALPISTRSAAVLVYDLQDGKLIYGKNADVQRSIASISKVMTAMVILDAELDMREEITLIASDLIGAKQASTRLKAGDRMTRSEFTLMMLMRSENPAAKALARTYPGGYDAFIVAMNQKAYDLGMYQTKFSDSSGLDPRNMSSANDLLIMMKAVNSSPRYHSIRNFSTAPHYDFYIANYGSGDRIYKGNNTNRLVREGAYPIGVQKTGYIREAGYSVVMETNINNRPAIVVLLGASNSANRWSDAETILTELAYRQ

SEQ ID NO: 902 - protein, 346 aa, Artificial Sequence
  Construct 15: MCRH3729-1 aa
SSTGTPAKPVSQTPKPIPQAKPSQQINISSGNTNLGNTKTGADVDVLDVQMLDALEALLQATDMSMVEGDELAIQRYGNLWDRVRRGYRINEMTNARIEAQKSWFYTRQTYLDRLTARASRYLHHTVAEAERRGIPSELALLPIIESSYDPTATSNAAAAGLWQFIPSTGRIYGLNQSATYDGRRDVIESTRAAYDFLTSLYNQFGSWELALAAYNAGPGRVSRAIKANQDQGLPTDYWSLKLPTETMNYVPRFLAVAQIVRSPNTYGINLPAIANHSHFRTVPVNYGVSLSEVATVTGLSVSELRLLNPALLNFTVDEIGPNRIVIPDSLPNQIDNQLASLKGYG

SEQ ID NO: 903 - protein, 122 aa, Artificial Sequence
  Construct 16: MCRH3759-1 aa
KTAAPKASEAPEVSLTQEEQMAIDFCDFSAYGVMHIAGDHQGGATKSEALTNHDKRMAELKDLIDLDPETATMLDKYWKGAIDRIFQESVQKTDAEKQAFVMGVGESSFYSCLDQVLKTPKN

SEQ ID NO: 904 - protein, 451 aa, Artificial Sequence
  Construct 17: MCRH3966-1 aa
QSLDHTQNAISTTKTPSTQAEHHDIYTQTLKNGLKVIIKQDSRAPIVMTQVWYDVGSSDEPIGKGGISHFLEHMMFKDAKGVSHDDYQRLISHFGGELNAFTSDEFTAYYESLPANQFPLALQIEANRMNNLILTAEEVATEKQVIKEERRLTTDDKPTAKAHEEFLAIALPNSPKGLPIIGSMPEIEAITVTDLQNWYDQWYAPNNATLVLVGDIDPKTALPWIEKYFGTLKPSSLPKRTPLSQPSHRGYTQANSYQNVKVPSLIMGFNVPTLGSRTIKNHTKEAHALSLLSDIADGGLSARFERHLIRKLQILNSVSIRYNMLSKSDDLFTIIATPREGVSLADAEAAILAELNAITNDQITDDELARSRAGLLSSLVFANDSIAKQASNLGALSALGLPLDTLDTLPKALDKVSKSDIQAVGKKYLTKDNLTTVYVLPKNTQSPSDTH

SEQ ID NO: 905 - protein, 146 aa, Artificial Sequence
  Construct 18: MCRH4526-1 aa
EDTLKDVPKATDFSVILDEVVVTATNGTKKSQKPFTKASATSVRENVFNASENIDAIVRSVPGAFTQQDKSSGLVSLNVRGDSGFGRANSMVDGVTQTFYSTSTDAGRGGGTSQFGAVIDQNFIAGVELNKGSFNGKGGINTLTGS

SEQ ID NO: 906 - protein, 780 aa, Artificial Sequence
  Construct 19: MCRH4526-2 aa
GKGGINTLTGSANFRTLNADDVIKDDKNFGFIAKGLTGKNATDKNFMLAAGGRGWLDNGSISALYAYSHKDISQNYKVGGGGTHIGNVGDDLLLSKQKQVFAKEHALTYNEASRSWQKDLTKLDKETGKPLWDRKYQFGGKCYGLGCIDTKEKFDEYVADKQQQWQKHGAKEYSITPIDITALNQTSKSHLAKIRYNNDTSDVGLQLRKMDTTIGSRRISNDNYQLDAAYNPNEIIDLKVLAAHNVGVQKYPKGSTFTGWKLDKDFETKNTANLFDLNNTHTFNLPKQMDLTTTVGLNILHNEYSKNRFPDELGLFYTNDLLCGGGYDACGGRFQGTSSTLPKKSVIVQPSGKQRFHSIYLDTSLQKDKYQLDYSVNASQYRFSGEHASYYSSQKEFQDKFGEDSQIYKQHCSPSCDVYEPLVTTSGKKHAINHSVTLSAKYDTGFMPFVSFARTHRMPNIQEMFFSQIGDVGVNTALKPEQANTYQLGFNVFKRNLLTDNDTLGLKVVGYQSRINNYIHNVYGKWYDTKNPPSWVTSGALKGDTIQHRNWQMPVHKQGLELEINYDAGRYFTNLSYARQKTDQPTNYSDASESPLNSSKEDQLTQGYGLSKVSMLPKDYGRFELGVRAFDNKLTMGSAVRYYGQSPRATIEPRYIDGTHGGNTSHSDDKGAHVIKQIEMLKRQPLVHDFYVAYEPIKDLVMRLDVQNAFDKLYIDPLDANNDAATQRYYHSYYNDADEGAPCAAGQLCKPDAKYGGTTRSVLTNFAKGRSLLFSMTYKW

SEQ ID NO: 907 - protein, 469 aa, Artificial Sequence
  Construct 20: MCRH4706-1 aa
DDGRTDNQEPINQEIATLEPIINHAQPELLSHGALTPKTEPILAQTPNPAEDTLIADEALLLDNPDLLNHALNSAVMTNHMAGVHALLPIYQKLPKDHQNGILLGYANALAALDKGNAKKAIDELRRIIAIMPEYNVVRFHLARALFMDKQNEAALDQFNKLHADNLPEEVRQVVGQYRQALKQRDSWTWQLGMNLAKEDNINQTPKNTTQGQWTFDKPIDAITLSYQLGADKKWSLPKGAYVGANAQIYGKHHQNHKKYNDHWGRLGANLGFADAKKDLSIETYGEKRFYGHERYTDTIGIRMSADYRINPKFQSLNAIDISRLTNHRTPRADSNNTLYSTSLIYYPNATRYYLLGADFYDEKVPQDPSDSYQRRGIRTAWGQEWAGGLSSRTQISINKRHYQGANLTSGGQIRHDKQMQASLSLWHRDIHKWGITPRLTISTNINKSNDIKANYHKNQMFVEFSRIF

SEQ ID NO: 908 - protein, 75 aa, Artificial Sequence
  Construct 21: MCRH4712-1 aa
NDRIKAQAYGDSNFAQNRQKAIQMLAARGYQVGDIEVDDFLGKPVFEVEAYKNGAEYDIVLEYPSLKIIKEQRDY

SEQ ID NO: 909 - protein, 531 aa, Artificial Sequence
  Construct 22: MCRH4730-1 aa
GKPSKIHTPSITHQNMLPSNTLAQLSALPQLTQGLGDTGKSVIDPNKPTLVKFWASWCPLCLATLQETHDWRDDPNLAGFNIITVASPTHLNEKNTQDFTDWYQVLQADYPNLPVLIDSSGQLIKELGVQVYPSWAILDKNGQLVYLNKGNLSFEQVSYLAKNPQELDQLKTQGGQTAMPTKNKDGVYYNDQGQPLNTKTIHLAGGCFWGVEAYFERIDGVVDAVSGYANGNETIANPSYEQVIAGSGHAETVKVVYDADKVDLDTLLQYYFRIVDPTSVNKQGHDRGIQYRTGVYYTDPSDKAIIENALNELQQKYKAPIVVENLPLRHFSPAEEYHQDYLTKNPNGYCHVDLSLANDKITSKAPTLPKASTVQEALDPRRYQAFTKDNLKQSLTKAQYDITQNAGTERAFSHAYDHLFDDGLYVDIVSGEPLFLSTDKYNSGCGWPSFTKPIDPQVISEHTDTSYNMIRTEVRSRIANSHLGHVFPDGPKARGGLRYCINGDALKFIPKADMEKQGYGALLPLIKPAQP

SEQ ID NO: 910 - protein, 278 aa, Artificial Sequence
  Construct 23: MCRH4740-1 aa
QNSISVYIAPQGSAHATVASAYTSSSSKNAVEPGFLTKLQTDTINSQKFTKLSNESQTVGRLYHYNEPTTNFSANFVANSYASYSGDYSERSTYDHLIRESAARHGVDPALIKAVIHTESSFNPNVRSRMGAMGLMQLMPGTARDMGVYNAWDPAQNIEGGTKYLAYLQHQFSNPNHVIAAYNAGPGNVKKYGGIPPFRETKNYVIKVNDRYNNIYRMDAALYQGYDANRTMLAMNSTPVAQVKTTTTSYAQPITQRAPSNPVINRDASAHIYFSNNE

SEQ ID NO: 911 - protein, 219 aa, Artificial Sequence
  Construct 24: MCRH5107-1 aa
SESVSEDDLTALIISANRASQSNPNSPLAESVREFEQAINPANQADTKPQSTPINIPTSHAQSISHDKLILNTPVVDVAKILTPSEYLHLTEQLHKIYQDNLAQAALVIVPSTDGIDIFDYALAVAERWQLGQADTDDGLLITVAVNDRKIYILTGYGLEGVLPDAALSRIIRDDITPAFKSGNYAQGLSAGIARIDERLRADPESLARADAQTDDSVD

SEQ ID NO: 912 - protein, 248 aa, Artificial Sequence
  Construct 25: MCRH5471-1 aa
SRFEMPLQIYTADNKLIGQYGNRYSLPVTFDEIPERMIQAFLAAEDDTFFEHSGISVKGMGRALTEVISDNDAQTGGSTITMQVAKNYFLSPERTINRKLTELFIARKIENELTKNEILTLYVNKIYLGEGTYGIQAAARRYYSKNLESLTIAQMAMIAGLPKAPSAYNPVVNPERAMERRNWIIGRMHQEGFITASEKDAAIAEPMGLNIYQEKLDLNMPYVAEMVRSTLVDRYGEAVMDSGWRVQT

SEQ ID NO: 913 - protein, 494 aa, Artificial Sequence
  Construct 26: MCRH5471-2 aa
AVMDSGWRVQTTINSSSQLAANAALVGGLRDYDRRHGWRGVEAESGSLEGRKNFDHIYPAKVTKVHNQSFEAKLQSGETVTIGWSGMNWARRYYDANRVGGGYSNAHQMVKVGNIVRISPINEAKTAWRMESIPKVQGALVSLDPENGALRAVVGGFHFNHSKFNRAIQGYRQPGSIIKPFIFAAALESGQYTPDSLISDAAIRVGRWQPKNADGRYTGDMTLRRALTLSRNTPAIRLLRSAGVDESRHLMNAMGGLEIERMPSTLALALGAADATPLQMATGFATIINGGHRIQPYFIERIYNFDNETIYQANPQQACALCFNENLSATNAKLLELFEANKSEISTDTPSAPAGDRLQPRSAPQYVAATQAPRVLSHQTAYDISNMMREVITSGTGRRARALGRSDVGGKTGTTNLAKDAWFAGFHPTNVAVVWVGFDTPSTLGNSEYGGVAALPIWVNFMSHELRNTPSQWISQEDRSKAVKATQQVIDLKD
